(19) United States
(12) Patent Application Publication
(10) Pub. No.: US 2022/0031776 A1
(43) Pub. Date: Feb. 3, 2022

(54) BACTERIOPHAGE FOR MODULATING INFLAMMATORY BOWEL DISEASE

(71) Applicants: Keio University, Tokyo (JP); BiomX Ltd., Ness Ziona (IL); Yeda Research and Development Co. Ltd. at the Weizmann Institute of Science, Rehovot (IL)

(72) Inventors: Kenya Honda, Tokyo (JP); Koji Atarashi, Tokyo (JP); Seiko Narushima, Tokyo (JP); Eran Elinav, Mazkeret Batia (IL); Rotem Sorek, Rehovet (IL); Efrat Khabra, Petach Tikva (IL); Hava Ben David, Rehovot (IL); Eyal Weinstock, Tel Aviv (IL); Sarah Pollock, Rehovot (IL); Yulia Matiuhin, Pardess Hanna Karkur (IL); Naomi Zak, Jerusalem (IL)

(21) Appl. No.: 16/644,641

(22) PCT Filed: Sep. 7, 2018
(86) PCT No.: PCT/IB2018/001128

§ 371 Date: Mar. 5, 2020

Related U.S. Application Data
(60) Provisional application No. 62/555,790, filed on Sep. 8, 2017.

(51) Int. Cl. A61K 35/76; C12N 7/00

(52) U.S. Cl. CPC A61K 35/76; C12N 2795/10032; C12N 2795/10021; C12N 7/00

(57) ABSTRACT

Disclosed herein are bacteriophage compositions and therapeutic uses thereof. The disclosure also relates to bacteriophage that are capable of lysing Klebsiella bacterial strains, e.g., strains that are associated with inflammatory bowel disease, and thereby capable of modulating disease.

[0001] This application claims priority to U.S. Provisional Application No. 62/555,790, filed Sep. 8, 2017, the contents of which are incorporated by reference herein in its entirety.

### BACKGROUND

[0002] The instant application contains a Sequence Listing which has been filed electronically in ASCII format and is hereby incorporated by reference in its entirety. Said ASCII copy, created on Aug. 31, 2017, is named 14283_6000-00000_SL.txt and is 32,895,979 bytes in size.

[0003] This disclosure relates to bacteriophage compositions and therapeutic uses thereof. In a particular aspect, the disclosure relates to lytic bacteriophages that are capable of lysing Klebsiella bacterial strains. In certain embodiments, the lytic bacteriophages are capable of lysing Klebsiella bacterial strains that are associated with inflammatory bowel disease (IBD) (e.g., ulcerative colitis, Crohn's disease), thereby modulating the disease.

[0004] Gut microbiota dysbiosis is associated with the pathogenesis of IBD (Said et al.). Increased stimulation from the gut microbiota can result in inflammation and alter a patient's immune response. In humans, the oral microbiota comprises over 700 species or phylotypes of bacteria (Said et al.). Ingested oral bacteria do not typically colonize the healthy intestine (Chen et al., 2016; Bik et al., 2010; U.S. Provisional Application No. 62/415,759, TH1 Cell Stimulatory Bacteria Colonizing in Human Oral Cavity; see also Example 1). However, bacteria of oral origin may be increased in the gut microbiota of patients with IBD (Gevers et al., 2014). Oral microbiota dysbiosis is observed in patients with IBD and could contribute to disease etiology (Said et al.).

[0005] IBDs, such as Crohn's disease (CD) and ulcerative colitis (UC), can cause diarrhea, malabsorption of nutrients, malnutrition, anemia, and weight loss. Severe intestinal inflammation can extend beyond the mucosa of the intestines and cause ulceration, bleeding, toxic megacolon, strictures, and fistulas. In addition, chronic inflammation is associated with colon cancer. Extraintestinal complications include, but are not limited to, arthritis, skin rashes, liver disease, and eye disorders such as episcleritis and uveitis.

[0006] According to the Crohn's & Colitis Foundation of America, “there is no single ideal therapy” for IBD. Dietary restriction alone has not been shown to ameliorate IBD. For many patients, surgical intervention is necessary. Even with the currently available IBD treatments, many patients experience IBD flares between periods of remission. Thus, there is significant unmet need for effective, reliable, and long-term treatment and/or prevention of IBD.

[0007] The disclosure provides bacteriophage compositions and therapeutic uses thereof. In specific embodiments, the invention provides lytic bacteriophages that are capable of lysing one or more Klebsiella species, strains, or substrains, such as Klebsiella pneumoniae (e.g., Klebsiella pneumoniae 2H7 strain, “KP2” herein) or Klebsiella aeromobilis (e.g., Klebsiella aeromobilis/Enterobacter aerogenes 11E12, “KP3” herein), that are associated with IBD. The disclosure provides methods for modulating IBD. The disclosure also provides methods for selecting patients to be treated with the methods provided herein.

### BRIEF DESCRIPTION OF THE FIGURES

[0008] FIGS. 1A-C. Isolation of TH1-cell-inducing, and proinflammatory Klebsiella pneumoniae strain from human saliva microbiota. (FIG. 1A) Frequencies of IFN-γ⁺ within colonic lamina propria (LP) CD4⁺TCRβ⁺ T cells from saliva microbiota-colonized germ-free (ex-GF) mice inoculated with saliva samples from patients with CD. Each point represents an individual mouse. (FIG. 1B) The percentage of TH1 cells in the colonic LP of B6 mice colonized with 8-mix, Veillo+Fuso, Kp-2H7, or 7-mix. (FIG. 1C) SEM images of the proximal colon of Kp-2H7- or Ec-2B1-monocolonized WT or Il10^{-/-} mice. Symbols represent individual mice. Error bars indicate mean±SEM. Data represent at least 2 independent experiments with similar results. *P<0.02; **P<0.001.

[0009] FIGS. 2A-C. Enterobacter aerogenes as another TH1-cell-inducing oral cavity bacterial species. (FIG. 2A) Frequencies of IFNγ⁺ within colonic LP CD4⁺TCRβ⁺ T cells from ex-GF mice inoculated with saliva samples from healthy donors and UC patients. Each point represents an individual mouse. (FIG. 2B) The percentage of TH1 cells in the colonic LP of B6 mice colonized with 13-mix, Efae-11A1, Ka-11E12, or 11-mix. (FIG. 2C) SEM images of the proximal colon of Ea-11E12-monocolonized WT or Il10^{-/-} mice.

[0010] FIG. 3. Host range analysis of phage isolated against KP2 and against KP3, including activity against other Klebsiella strains as indicated. Activity was measured at two phage titers—1×10⁹ PFU/mL and 1×10⁶ PFU/mL. S— sensitive, R— resistant, NT—not tested, PFU—plaque forming units

[0011] FIG. 4. Appearance of phage resistant mutants in the KP2 culture infected with single phages and with a cocktail of 6 phage compared to the non-infected control. KP2 growth curve without phage is illustrated by the black line, while the remaining lines present the growth curves of KP2 with a single phage as indicated. The dashed line represents KP2 growth curve in the presence of the cocktail of six phages. The KP2 growth curves generated in the presence of individual phages demonstrate the regrowth of resistant or appearance of mutant strains after 1-2 hrs. In contrast, the growth of KP2 in the presence of the cocktail displays appearance of resistant mutants after 9 hrs enabling significant improvement in a “time to mutant” parameter. Similar analysis performed for KP3 strain resulted in tripled “time to mutant” or even no appearance of mutants during the course of the study.

[0012] FIG. 5. Host range analysis and percent homology of phages isolated against mutant KP2 strains resistant to the infection by the original KP2 phages. (Left) Host range analysis for phage isolated on the resistant bacterial mutant strain MKP2_2161_1 (resistant to phage KP2W-P0104) and MKP2_coc_1, a resistant bacterial mutant strain (resistant to phages KP2W-P0101, KP2W-P0102, KP2W-P0103, KP2W-P0104, KP2W-P0106, KP2W-M0104) and on KP2 strains, was performed on four additional KP mutants; MKP2_2161_C (resistant to the infection by KP2W-P0104), MKP2_251_B, MKP2_251_C and MKP2_251_D (resistant to the infection by KP2W-M0104). Each of the phage were added (10 μL) to bacterial lawns of the different K. pneumoniae strains, in 48 well plates by drop assay. Plates were incubated for 2-3 hrs (37° C.) in aerobic conditions, after which plaques become visible on the bacterial lawns. Plates with bacterial lawns of MKP2_2161_1, MKP2_coc_1, KP2 and their respective phage served as positive control. Host range was done for each of the phage with two phage titers; 1×10⁶ PFU/mL and 1×10⁹ PFU/mL. R-resistant to the infection with the tested phage, S— sensitive to the infection with the tested phage, NT—not tested. However phage that were isolated on KP2 infected part or all KP2 mutant strains as well as the commercial strain KP4. (Right) Percent homology between the phages genomes is determined by combining all non-overlapping BLASTN alignment segments (BLAST HSPs), summing the values of their “Number of identical matches” and dividing this sum by the length of the query sequence. In some embodiments, this results in a non-symmetrical matrix.

[0013] FIG. 6. Percent homology of phages isolated against KP3, including 19 phage of class podoviridae (indicated by P) and 2 phage of class siphoviridae (Indicated by S). Percent homology between the phages genomes is determined by combining all non-overlapping BLASTN alignment segments (BLAST HSPs), summing the values of their “Number of identical matches” and dividing this sum by the length of the query sequence. In some embodiments, this results in a non-symmetrical matrix.

[0014] Sequences of exemplary bacteriophage and bacteria are disclosed in Table 1. The KP2 genome has been sequenced and is known in the art, see, e.g., GenBank BDQR01000001.1 (https://www.ncbi.nlm.nih.gov/nuccore/BDQR01000001.1), GenBank GCA_002260905.1 (https://www.ncbi.nlm nih.gov/assembly/GCA_002260905.1), BioSample: SAMD00083910 (https://www.ncbi.nlm nih.gov/biosample/SAMD00083910/), BioProject PRJDB5883 (https://www.ncbi.nlm.nih.gov/bioproject/PRJDB5883), and Atarashi et al., Ectopic colonization of oral bacteria in the intestine drives THJ cell induction and inflammation, Science (2017). In some embodiments, a genomic sequence, e.g., a KP2 genomic sequence, may encompass minor sequencing differences, e.g., less than 0.5%, less than 1%, less than 1.5%, less than 2%, less than 2.5%, or less than 3% as compared to another genomic sequence of the same bacterium, and the sequencing differences should not result in functional differences, e.g., bacteriophage infectivity, of the bacterium.

TABLE 1
Brief Description of the Sequences

| SEQ ID NO: | Sequence Name |
|---|---|
| 1 | KP3W-P0101 Bacteriophage Sequence |
| 2 | KP3W-P0102 Bacteriophage Sequence |
| 3 | KP3W-P0103 Bacteriophage Sequence |
| 4 | KP3W-P0104 Bacteriophage Sequence |
| 5 | KP3W-P0105 Bacteriophage Sequence |
| 6 | KP3W-P0106 Bacteriophage Sequence |
| 7 | KP3W-P0107 Bacteriophage Sequence |
| 8 | KP3W-P0108 Bacteriophage Sequence |
| 9 | KP3W-P0109 Bacteriophage Sequence |
| 10 | KP3W-P0110 Bacteriophage Sequence |
| 11 | KP3W-P0111 Bacteriophage Sequence |
| 12 | KP3W-P0112 Bacteriophage Sequence |
| 13 | KP3W-P0113 Bacteriophage Sequence |
| 14 | KP3W-P0114 Bacteriophage Sequence |
| 15 | KP3W-P0201 Bacteriophage Sequence |
| 16 | KP3W-P0202 Bacteriophage Sequence |
| 17 | KP3W-P0203 Bacteriophage Sequence |
| 18 | KP3W-S0101 Bacteriophage Sequence |
| 19 | KP3W-S0102 Bacteriophage Sequence |
| 20 | KP3W-S0102 Bacteriophage Sequence |
| 21 | KP2W-P0101 Bacteriophage Sequence |
| 22 | KP2W-P0102 Bacteriophage Sequence |
| 23 | KP2W-P0103 Bacteriophage Sequence |
| 24 | KP2W-P0104 Bacteriophage Sequence |
| 25 | KP2W-P0105 Bacteriophage Sequence |
| 26 | KP2W-P0106 Bacteriophage Sequence |
| 27 | KP2W-P0107 Bacteriophage Sequence |
| 28 | KP2W-P0108 Bacteriophage Sequence |
| 29 | KP2W-P0109 Bacteriophage Sequence |
| 30 | KP2W-M0102 Bacteriophage Sequence |
| 31 | KP2W-M0103 Bacteriophage Sequence |
| 32 | KP2W-M0104 Bacteriophage Sequence |
| 33 | KP2M-M0105 Bacteriophage Sequence |
| 34 | KP2W-M0106 Bacteriophage Sequence |
| 35 | KP2W-M0107 Bacteriophage Sequence |
| 36 | KP2M-M0108 Bacteriophage Sequence |
| 37 | KP2M-M0109 Bacteriophage Sequence |
| 38 | KP2M-M0110 Bacteriophage Sequence |
| 39 | KP2M-M0111 Bacteriophage Sequence |
| 40 | KP2M-M0112 Bacteriophage Sequence |
| 41 | KP2M-P0201 Bacteriophage Sequence |
| 42 | KP2W-P0202 Bacteriophage Sequence |
| 43 | KP2M-P0203 Bacteriophage Sequence |
| 44 | KP2M-P0204 Bacteriophage Sequence |
| 45 | KP2M-P0205 Bacteriophage Sequence |
| 46 | KP2M-P0206 Bacteriophage Sequence |
| 47 | KP2M-P0207 Bacteriophage Sequence |
| 48 | KP2M-P0208 Bacteriophage Sequence |
| 49 | KP2M-P0209 Bacteriophage Sequence |
| 50 | KP2M-P0210 Bacteriophage Sequence |
| 51 | KP2M-P0211 Bacteriophage Sequence |
| 52 | KP2M-P0212 Bacteriophage Sequence |
| 53 | MKP2_coc_1 Mutant Bacteria Sequence |
| 54 | MKP2_coc_1 Mutant Bacteria Sequence |
| 55 | MKP2_coc_1 Mutant Bacteria Sequence |
| 56 | MKP2_coc_1 Mutant Bacteria Sequence |
| 57 | MKP2_coc_1 Mutant Bacteria Sequence |
| 58 | MKP2_coc_1 Mutant Bacteria Sequence |
| 59 | MKP2_coc_1 Mutant Bacteria Sequence |
| 60 | MKP2_coc_1 Mutant Bacteria Sequence |
| 61 | MKP2_coc_1 Mutant Bacteria Sequence |
| 62 | MKP2_coc_1 Mutant Bacteria Sequence |
| 63 | MKP2_coc_1 Mutant Bacteria Sequence |
| 64 | MKP2_coc_1 Mutant Bacteria Sequence |
| 65 | MKP2_coc_1 Mutant Bacteria Sequence |
| 66 | MKP2_coc_1 Mutant Bacteria Sequence |
| 67 | MKP2_coc_1 Mutant Bacteria Sequence |
| 68 | MKP2_coc_1 Mutant Bacteria Sequence |
| 69 | MKP2_coc_1 Mutant Bacteria Sequence |
| 70 | MKP2_coc_1 Mutant Bacteria Sequence |
| 71 | MKP2_coc_1 Mutant Bacteria Sequence |
| 72 | MKP2_coc_1 Mutant Bacteria Sequence |
| 73 | MKP2_coc_1 Mutant Bacteria Sequence |
| 74 | MKP2_coc_1 Mutant Bacteria Sequence |
| 75 | MKP2_coc_1 Mutant Bacteria Sequence |
| 76 | MKP2_coc_1 Mutant Bacteria Sequence |
| 77 | MKP2_coc_1 Mutant Bacteria Sequence |
| 78 | MKP2_coc_1 Mutant Bacteria Sequence |
| 79 | MKP2_coc_1 Mutant Bacteria Sequence |
| 80 | MKP2_coc_1 Mutant Bacteria Sequence |
| 81 | MKP2_coc_1 Mutant Bacteria Sequence |
| 82 | MKP2_coc_1 Mutant Bacteria Sequence |
| 83 | MKP2_coc_1 Mutant Bacteria Sequence |
| 84 | MKP2_coc_1 Mutant Bacteria Sequence |
| 85 | MKP2_coc_1 Mutant Bacteria Sequence |
| 86 | MKP2_coc_1 Mutant Bacteria Sequence |
| 87 | MKP2_coc_1 Mutant Bacteria Sequence |
| 88 | MKP2_coc_1 Mutant Bacteria Sequence |
| 89 | MKP2_coc_1 Mutant Bacteria Sequence |
| 90 | MKP2_coc_1 Mutant Bacteria Sequence |
| 91 | MKP2_coc_1 Mutant Bacteria Sequence |
| 92 | MKP2_coc_1 Mutant Bacteria Sequence |
| 93 | MKP2_coc_1 Mutant Bacteria Sequence |
| 94 | MKP2_coc_1 Mutant Bacteria Sequence |
| 95 | MKP2_coc_1 Mutant Bacteria Sequence |
| 96 | MKP2_coc_1 Mutant Bacteria Sequence |
| 97 | MKP2_coc_1 Mutant Bacteria Sequence |
| 98 | MKP2_coc_1 Mutant Bacteria Sequence |
| 99 | MKP2_coc_1 Mutant Bacteria Sequence |
| 100 | MKP2_coc_1 Mutant Bacteria Sequence |
| 101 | MKP2_coc_1 Mutant Bacteria Sequence |
| 102 | MKP2_coc_1 Mutant Bacteria Sequence |
| 103 | MKP2_coc_1 Mutant Bacteria Sequence |
| 104 | MKP2_coc_1 Mutant Bacteria Sequence |
| 105 | MKP2_coc_1 Mutant Bacteria Sequence |
| 106 | MKP2_coc_1 Mutant Bacteria Sequence |
| 107 | MKP2_coc_1 Mutant Bacteria Sequence |
| 108 | MKP2_coc_1 Mutant Bacteria Sequence |
| 109 | MKP2_coc_1 Mutant Bacteria Sequence |
| 110 | MKP2_coc_1 Mutant Bacteria Sequence |
| 111 | MKP2_coc_1 Mutant Bacteria Sequence |
| 112 | MKP2_coc_1 Mutant Bacteria Sequence |
| 113 | MKP2_coc_1 Mutant Bacteria Sequence |
| 114 | MKP2_coc_1 Mutant Bacteria Sequence |
| 115 | MKP2_coc_1 Mutant Bacteria Sequence |
| 116 | MKP2_coc_1 Mutant Bacteria Sequence |
| 117 | MKP2_coc_1 Mutant Bacteria Sequence |
| 118 | MKP2_coc_1 Mutant Bacteria Sequence |
| 119 | MKP2_coc_1 Mutant Bacteria Sequence |
| 120 | MKP2_coc_1 Mutant Bacteria Sequence |
| 121 | MKP2_coc_1 Mutant Bacteria Sequence |
| 122 | MKP2_coc_1 Mutant Bacteria Sequence |
| 123 | MKP2_coc_1 Mutant Bacteria Sequence |
| 124 | MKP2_coc_1 Mutant Bacteria Sequence |
| 125 | MKP2_coc_1 Mutant Bacteria Sequence |
| 126 | MKP2_coc_1 Mutant Bacteria Sequence |
| 127 | MKP2_2161_1 Mutant Bacteria Sequence |
| 128 | MKP2_2161_1 Mutant Bacteria Sequence |
| 129 | MKP2_2161_1 Mutant Bacteria Sequence |
| 130 | MKP2_2161_1 Mutant Bacteria Sequence |
| 131 | MKP2_2161_1 Mutant Bacteria Sequence |
| 132 | MKP2_2161_1 Mutant Bacteria Sequence |
| 133 | MKP2_2161_1 Mutant Bacteria Sequence |
| 134 | MKP2_2161_1 Mutant Bacteria Sequence |
| 135 | MKP2_2161_1 Mutant Bacteria Sequence |
| 136 | MKP2_2161_1 Mutant Bacteria Sequence |
| 137 | MKP2_2161_1 Mutant Bacteria Sequence |
| 138 | MKP2_2161_1 Mutant Bacteria Sequence |
| 139 | MKP2_2161_1 Mutant Bacteria Sequence |
| 140 | MKP2_2161_1 Mutant Bacteria Sequence |
| 141 | MKP2_2161_1 Mutant Bacteria Sequence |
| 142 | MKP2_2161_1 Mutant Bacteria Sequence |
| 143 | MKP2_2161_1 Mutant Bacteria Sequence |
| 144 | MKP2_2161_1 Mutant Bacteria Sequence |
| 145 | MKP2_2161_1 Mutant Bacteria Sequence |
| 146 | MKP2_2161_1 Mutant Bacteria Sequence |
| 147 | MKP2_2161_1 Mutant Bacteria Sequence |
| 148 | MKP2_2161_1 Mutant Bacteria Sequence |
| 149 | MKP2_2161_1 Mutant Bacteria Sequence |
| 150 | MKP2_2161_1 Mutant Bacteria Sequence |
| 151 | MKP2_2161_1 Mutant Bacteria Sequence |
| 152 | MKP2_2161_1 Mutant Bacteria Sequence |
| 153 | MKP2_2161_1 Mutant Bacteria Sequence |
| 154 | MKP2_2161_1 Mutant Bacteria Sequence |
| 155 | MKP2_2161_1 Mutant Bacteria Sequence |
| 156 | MKP2_2161_1 Mutant Bacteria Sequence |
| 157 | MKP2_2161_1 Mutant Bacteria Sequence |
| 158 | MKP2_2161_1 Mutant Bacteria Sequence |
| 159 | MKP2_2161_1 Mutant Bacteria Sequence |
| 160 | MKP2_2161_1 Mutant Bacteria Sequence |
| 161 | MKP2_2161_1 Mutant Bacteria Sequence |
| 162 | MKP2_2161_1 Mutant Bacteria Sequence |
| 163 | MKP2_2161_1 Mutant Bacteria Sequence |
| 164 | MKP2_2161_1 Mutant Bacteria Sequence |
| 165 | MKP2_2161_1 Mutant Bacteria Sequence |
| 166 | MKP2_2161_1 Mutant Bacteria Sequence |
| 167 | MKP2_2161_1 Mutant Bacteria Sequence |
| 168 | MKP2_2161_1 Mutant Bacteria Sequence |
| 169 | MKP2_2161_1 Mutant Bacteria Sequence |
| 170 | MKP2_2161_1 Mutant Bacteria Sequence |
| 171 | MKP2_2161_1 Mutant Bacteria Sequence |
| 172 | MKP2_2161_1 Mutant Bacteria Sequence |
| 173 | MKP2_2161_1 Mutant Bacteria Sequence |
| 174 | MKP2_2161_1 Mutant Bacteria Sequence |
| 175 | MKP2_2161_1 Mutant Bacteria Sequence |
| 176 | MKP2_2161_1 Mutant Bacteria Sequence |
| 177 | MKP2_2161_1 Mutant Bacteria Sequence |
| 178 | MKP2_2161_1 Mutant Bacteria Sequence |
| 179 | MKP2_2161_1 Mutant Bacteria Sequence |
| 180 | MKP2_2161_1 Mutant Bacteria Sequence |
| 181 | MKP2_2161_1 Mutant Bacteria Sequence |
| 182 | MKP2_2161_1 Mutant Bacteria Sequence |
| 183 | MKP2_2161_1 Mutant Bacteria Sequence |
| 184 | MKP2_2161_1 Mutant Bacteria Sequence |
| 185 | MKP2_2161_1 Mutant Bacteria Sequence |
| 186 | MKP2_2161_1 Mutant Bacteria Sequence |
| 187 | MKP2_2161_1 Mutant Bacteria Sequence |
| 188 | MKP2_2161_1 Mutant Bacteria Sequence |
| 189 | MKP2_2161_1 Mutant Bacteria Sequence |
| 190 | MKP2_2161_1 Mutant Bacteria Sequence |
| 191 | MKP2_2161_1 Mutant Bacteria Sequence |
| 192 | MKP2_2161_1 Mutant Bacteria Sequence |
| 193 | MKP2_2161_1 Mutant Bacteria Sequence |
| 194 | MKP2_2161_1 Mutant Bacteria Sequence |
| 195 | MKP2_2161_1 Mutant Bacteria Sequence |
| 196 | MKP2_2161_1 Mutant Bacteria Sequence |
| 197 | MKP2_2161_1 Mutant Bacteria Sequence |
| 198 | MKP2_2161_1 Mutant Bacteria Sequence |
| 199 | MKP2_2161_1 Mutant Bacteria Sequence |
| 200 | MKP2_2161_1 Mutant Bacteria Sequence |
| 201 | MKP2_2161_1 Mutant Bacteria Sequence |
| 202 | MKP2_2161_1 Mutant Bacteria Sequence |
| 203 | MKP2_2161_1 Mutant Bacteria Sequence |
| 204 | MKP2_2161_1 Mutant Bacteria Sequence |
| 205 | MKP2_2161_1 Mutant Bacteria Sequence |
| 206 | MKP2_2161_1 Mutant Bacteria Sequence |
| 207 | MKP2_2161_1 Mutant Bacteria Sequence |
| 208 | MKP2_2161_1 Mutant Bacteria Sequence |
| 209 | MKP2_2161_1 Mutant Bacteria Sequence |
| 210 | MKP2_2161_1 Mutant Bacteria Sequence |
| 211 | MKP2_2161_1 Mutant Bacteria Sequence |
| 212 | MKP2_2161_1 Mutant Bacteria Sequence |
| 213 | MKP2_2161_1 Mutant Bacteria Sequence |
| 214 | MKP2_2161_1 Mutant Bacteria Sequence |
| 215 | MKP2_2161_1 Mutant Bacteria Sequence |
| 216 | MKP2_2161_1 Mutant Bacteria Sequence |
| 217 | MKP2_2161_1 Mutant Bacteria Sequence |
| 218 | MKP2_2161_1 Mutant Bacteria Sequence |
| 219 | MKP2_2161_1 Mutant Bacteria Sequence |
| 220 | MKP2_2161_1 Mutant Bacteria Sequence |
| 221 | MKP2_2161_1 Mutant Bacteria Sequence |
| 222 | MKP2_2161_1 Mutant Bacteria Sequence |
| 223 | MKP2_2161_1 Mutant Bacteria Sequence |
| 224 | MKP2_2161_1 Mutant Bacteria Sequence |
| 225 | MKP2_2161_1 Mutant Bacteria Sequence |
| 226 | MKP2_2161_1 Mutant Bacteria Sequence |
| 227 | MKP2_2161_1 Mutant Bacteria Sequence |
| 228 | MKP2_2161_1 Mutant Bacteria Sequence |
| 229 | MKP2_2161_1 Mutant Bacteria Sequence |
| 230 | MKP2_2161_1 Mutant Bacteria Sequence |
| 231 | MKP2_2161_1 Mutant Bacteria Sequence |
| 232 | MKP2_2161_1 Mutant Bacteria Sequence |
| 233 | MKP2_2161_1 Mutant Bacteria Sequence |
| 234 | MKP2_2161_1 Mutant Bacteria Sequence |
| 235 | MKP2_2161_1 Mutant Bacteria Sequence |
| 236 | MKP2_2161_1 Mutant Bacteria Sequence |
| 237 | MKP2_2161_1 Mutant Bacteria Sequence |
| 238 | MKP2_2161_1 Mutant Bacteria Sequence |
| 239 | MKP2_2161_1 Mutant Bacteria Sequence |
| 240 | MKP2_2161_1 Mutant Bacteria Sequence |
| 241 | MKP2_2161_1 Mutant Bacteria Sequence |
| 242 | MKP2_2161_1 Mutant Bacteria Sequence |
| 243 | MKP2_2161_1 Mutant Bacteria Sequence |
| 244 | MKP2_2161_1 Mutant Bacteria Sequence |
| 245 | MKP2_2161_1 Mutant Bacteria Sequence |
| 246 | MKP2_2161_1 Mutant Bacteria Sequence |
| 247 | MKP2_2161_1 Mutant Bacteria Sequence |
| 248 | MKP2_2161_1 Mutant Bacteria Sequence |
| 249 | MKP2_2161_1 Mutant Bacteria Sequence |
| 250 | MKP2_2161_1 Mutant Bacteria Sequence |
| 251 | MKP2_2161_1 Mutant Bacteria Sequence |
| 252 | MKP2_2161_1 Mutant Bacteria Sequence |
| 253 | MKP2_2161_1 Mutant Bacteria Sequence |
| 254 | MKP2_2161_1 Mutant Bacteria Sequence |
| 255 | MKP2_2161_1 Mutant Bacteria Sequence |
| 256 | MKP2_2161_1 Mutant Bacteria Sequence |
| 257 | MKP2_2161_1 Mutant Bacteria Sequence |
| 258 | MKP2_2161_1 Mutant Bacteria Sequence |
| 259 | MKP2_2161_1 Mutant Bacteria Sequence |
| 260 | MKP2_2161_1 Mutant Bacteria Sequence |
| 261 | MKP2_2161_1 Mutant Bacteria Sequence |
| 262 | MKP2_2161_1 Mutant Bacteria Sequence |
| 263 | MKP2_2161_1 Mutant Bacteria Sequence |
| 264 | MKP2_2161_1 Mutant Bacteria Sequence |
| 265 | MKP2_2161_1 Mutant Bacteria Sequence |
| 266 | MKP2_2161_1 Mutant Bacteria Sequence |
| 267 | MKP2_2161_1 Mutant Bacteria Sequence |
| 268 | MKP2_2161_1 Mutant Bacteria Sequence |
| 269 | MKP2_2161_1 Mutant Bacteria Sequence |
| 270 | MKP2_2161_1 Mutant Bacteria Sequence |
| 271 | MKP2_2161_1 Mutant Bacteria Sequence |
| 272 | MKP2_2161_1 Mutant Bacteria Sequence |
| 273 | MKP2_2161_1 Mutant Bacteria Sequence |
| 274 | MKP2_2161_1 Mutant Bacteria Sequence |
| 275 | MKP2_2161_1 Mutant Bacteria Sequence |
| 276 | MKP2_2161_1 Mutant Bacteria Sequence |
| 277 | MKP2_2161_1 Mutant Bacteria Sequence |
| 278 | MKP2_2161_1 Mutant Bacteria Sequence |
| 279 | MKP2_2161_1 Mutant Bacteria Sequence |
| 280 | MKP2_2161_1 Mutant Bacteria Sequence |
| 281 | MKP2_2161_1 Mutant Bacteria Sequence |
| 282 | MKP2_2161_1 Mutant Bacteria Sequence |
| 283 | KP2 Bacteria Sequence |
| 284 | KP2 Bacteria Sequence |
| 285 | KP2 Bacteria Sequence |
| 286 | KP3 Bacteria Sequence |

### DESCRIPTION OF EMBODIMENTS

[0015] The disclosure relates to bacteriophage, pharmaceutical compositions thereof, methods of modulating IBD (Jostins et al., 2012), and methods of selecting patients that are responsive to treatment by the methods set forth herein. In some embodiments, the bacteriophage described herein is capable of lysing Klebsiella bacterial that are associated with IBD. Klebisella pneumoniae have been linked to IBD. IBD patients demonstrate elevated systemic antibodies against certain capsular types (e.g., K2, K17, K26, K36, K50, and K21 found in KP2) compared to controls and other pathologic conditions. These findings suggest the involvement of Klebsiella in IBD, but do not explain whether Klebsiella is actively involved in the pathogenesis of the disease and do not provide strain-specific resolution as different strains share similar capsular types. Example 1 shows the relationship between intestinal administration of a single pathobiont strain (KP2 or KP3) and an immune response in the intestine (TH1 polarization in the lamina propria) and induction of colitis in vivo (in Il10−/− mice).

### Definitions

[0016] In order that the disclosure may be more readily understood, certain terms are first defined. These definitions should be read in light of the remainder of the disclosure and as understood by a person of ordinary skill in the art. Unless defined otherwise, all technical and scientific terms used herein have the same meaning as commonly understood by a person of ordinary skill in the art. Additional definitions are set forth throughout the detailed description.

[0017] As used herein, the terms “treat” and “modulate” and their cognates refer to an amelioration of IBD or at least one discernible symptom thereof. In some embodiments, “treat” and “modulate” and their cognates refer to an amelioration of at least one measurable physical parameter, not necessarily discernible by the patient. In some embodiments, “treat” and “modulate” and their cognates refer to inhibiting or reducing or slowing the progression of IBD, either physically (e.g., stabilization of a discernible symptom), physiologically (e.g., stabilization of a physical parameter), or both, relative to an untreated control. In certain embodiments, “treat” and “modulate” and their cognates refer to slowing the progression or reversing the progression of IBD relative to an untreated control. As used herein, “prevent” and its cognates refer to delaying the onset or reducing the risk of acquiring IBD or a symptom associated with IBD relative to an untreated control.

[0018] In certain embodiments, the bacteriophage described herein is administered to ameliorate an IBD in a subject and results in one or more symptoms or physical parameters of the condition or disorder to improve by at least about 10%, 20%, 30%, 40%, 50%, 60%, 70%, 80%, 90%, 95%, or more as compared to levels in an untreated or control subject. In some embodiments, the improvement is measured by comparing the symptom or physical parameter in a subject before and after administration of the bacteriophage. In some embodiments, the measurable physical parameter is a reduction in bacterial CFU in the stool.

[0019] The measurable physical parameter may be any suitable clinical parameter known in the art, e.g., for Crohn's disease (Sandborn et al., 2013; Best et al., 1976; Warrel—Oxford Textbook of Medicine, 5^{th} edition) or for ulcerative colitis (Tursi et al., 2010; Warrel—Oxford Textbook of Medicine, 5^{th} edition). Crohn's disease parameters include but are not limited to assessment of clinical remission using Crohn's Disease Activity Index (CDAI) (CDAI score of <150 points) and CDAI-100 response (>100-point decrease in the CDAI score from the baseline); inflammation reduction as measured by decrease in serum levels of C-reactive protein, differential blood count and serum albumin levels; reduced levels of fecal calprotectin and improvement in the appearance of the mucosal layer in terminal ileum and rectum as evaluated by microscopic examination of the biopsies collected during endoscopic procedures (e.g., reduction in neutrophil, macrophage and other immune cell infiltration, granuloma size and number, reduction in the number and size of ulcers, edematous mucosa). In addition the improvement of the disease may be evaluated based on the assessment of the clinical symptoms including diarrhea, abdominal pain, weight loss, fever, vomiting, colic, rectal bleeding, anemia, extraintestinal manifestations (hypersensitivity rash to sulphasalazine, erythema nodosum, pyoderma gangrenosum, oral aphthous ulcers, sore tongue, angular stomatitis, episcleritis or an anterior uveitis, arthritis, acute arthropathy, low back pain, sacroiliitis, ankylosing spondylitis, liver diseases: minor elevations of alkaline phosphatase or transaminases, primary sclerosing cholangitis, chronic liver disease ranging from an autoimmune hepatitis to the classic picture of concentric periductular fibrosis with obliteration of bile ducts, pericarditis with or without an effusion, autoimmune haemolytic anaemia, amyloid, rapidly progressing bronchiectasis).

[0020] Ulcerative colitis disease parameters include but not limited to improvement in the ulcerative colitis disease activity index (UCDAI) (UCDAI decrease of 50% or more from the baseline), activity of relapsing UC; remission, considered as UCDAI≤2; improvement in hemoglobin levels, serum albumin levels, decrease in C-reactive protein levels; improvement in neutrophil leukocytosis (blood differential count); improvement in endoscopic scores (reduction in the edematous mucosa area, reduction in neutrophil, macrophage and other immune cell infiltration, reduction in the number and size of ulcers, edematous mucosa; improvement in the clinical symptoms: rectal bleeding, fever, stool frequency, diarrhea, the passage of mucus, abdominal pain, constipation, anorexia, nausea, weight loss, malaise, lassitude, symptoms of chronic iron deficiency, minor perianal disease, such as a fissure, extraintestinal manifestations described above, and additionally oral candidiasis, finger clubbing.

[0021] Those in need of treatment may include individuals already having IBD, as well as those at risk of having, or who may ultimately acquire the disease. The need for treatment is assessed, e.g., by the presence of one or more risk factors associated with the development of IBD, the presence or progression of IBD, or likely receptiveness to treatment of a subject having IBD. For example, “treating” IBD may encompass reducing or eliminating associated symptoms, and does not necessarily encompass the elimination of the underlying disease etiology, e.g., a genetic instability locus.

[0022] In some embodiments, an individual with IBD is in remission and/or presently asymptomatic, and the bacteriophage described herein may be administered during the remission period to reduce the potential for a flare-up. In some embodiments, the individual in remission and/or presently asymptomatic for IBD is undergoing treatment, e.g., antibiotics and/or steroids, and the bacteriophage described herein may be co-administered with such treatment to reduce the potential for a flare-up.

[0023] Klebsiella is a genus of bacteria belonging to the Enterobacteriaceae family Klebsiella are gram-negative, nonmotile, and rod-shaped. In some embodiments, the species of Klebsiella may be associated with human disease, e.g., Klebsiella pneumoniae. As used herein, Klebsiella includes bacteria that are currently classified, were previously classified, or will be reclassified as Klebsiella bacteria, e.g., Klebsiella aeromobilis, which is also known as Enterobacter aerogenes (Tindall et al., 2017; Diene et al., 2013). In some embodiments, Klebsiella refers to Klebsiella pneumoniae. In some embodiments, Klebsiella refers to Klebsiella aeromobilis/Enterobacter aero genes bacteria. In some embodiments, Klebsiella refers to naturally occurring Klebsiella. In some embodiments, Klebsiella refers to naturally occurring, variant or mutant Klebsiella (e.g., antibiotic resistant, phage resistant, nosocomial). In some embodiments, the variant or mutant Klebsiella is resistant to at least 1, at least 2, at least 3, at least 4, or at least 5 antibiotics. In some embodiments, a mutant bacterial strain may arise in the presence of a bacteriophage and become resistant to said bacteriophage.

[0024] As used herein, a “strain” of bacteria refers to a genetic variant or subtype of bacteria. In some embodiments, a “strain” of bacteria comprises descendants from a single isolation in a pure culture of said bacteria. As used herein, a “strain” of bacteria may refer to one or more genetic variants or subtypes of said bacteria. For example, as used herein, a “strain” of Klebsiella pneumoniae may refer to one or more genetic variants or subtypes of Klebsiella pneumoniae, including but not limited to KP1 (ATCC BAA-2552; also referred to as Klebsiella variicola), KP2 (Klebsiella pneumoniae strain 2H7 described herein), KP4 (ATCC 23356), KP5 (ATCC 13882), KP6 (ATCC BAA-1705), KP7 (ATCC 700603), and KP8 (ATCC 700721). Similarly, as used herein, a bacteriophage that is capable of lysing a “strain” of Klebsiella pneumoniae refers to a bacteriophage that is capable of lysing one or more genetic variants or subtypes of Klebsiella pneumoniae, including but not limited to KP1, KP2, KP3, KP4, KP5, KP6, KP7, and KP8. In some embodiments, a bacteriophage that is capable of lysing a “strain” of Klebsiella pneumoniae refers to a bacteriophage that is capable of lysing one or more genetic variants or subtypes of Klebsiella pneumoniae KP1, KP2, KP4, KP5, KP6, KP7, and KP8. In some embodiments, a bacteriophage that is capable of lysing a “strain” of Klebsiella pneumoniae refers to a bacteriophage that is capable of lysing one or more genetic variants or subtypes of Klebsiella pneumoniae KP2, KP4, KP5, KP6, KP7, and KP8. In some embodiments, a bacteriophage that is capable of lysing a “strain” of Klebsiella aeromobilis/Enterobacter aerogenes refers to a bacteriophage that is capable of lysing one or more genetic variants or subtypes of Klebsiella aeromobilis/Enterobacter aerogenes KP3, e.g., strain 11E12 described herein. In some embodiments, the KP2 bacteriophage described herein is capable of lysing a KP2 strain of Klebsiella pneumoniae. In some embodiments, the KP3 bacteriophage described herein is capable of lysing a KP3 strain of Klebsiella aeromobilis.

[0025] In some embodiments, as used herein, a “mutant” bacterium refers to a bacterium that comprises greater than about 85%, greater than about 90%, greater than about 95%, greater than about 97%, or greater than about 99% homology to a corresponding wild-type bacterial strain. For example, a mutant KP2 bacterium comprises greater than about 85%, greater than about 90%, greater than about 95%, greater than about 97%, or greater than about 99% homology to a wild-type KP2 bacterium (Table 1, contigs). A mutant KP3 bacterium comprises greater than about 85%, greater than about 90%, greater than about 95%, greater than about 97%, or greater than about 99% homology to a wild-type KP3 bacterium (Table 1).

[0026] In some embodiments, a “mutant” KP2 bacterium is a bacterium that is capable of being lysed by the KP2 bacteriophage disclosed herein. In some embodiments, a “mutant” KP2 bacterium refers to a bacterium comprising less than about 85% homology as compared to wild-type KP2, but is capable of being lysed by the KP2 bacteriophage disclosed herein. In some embodiments, a “mutant” KP3 bacterium is a bacterium that is capable of being lysed by the KP3 bacteriophage disclosed herein. In some embodiments, a “mutant” KP3 bacterium refers to a bacterium comprising less than about 85% homology as compared to wild-type KP3, but is capable of being lysed by the KP3 bacteriophage disclosed herein.

[0027] In some embodiments, a KP2 bacterium, e.g., a strain of KP2 bacterium, and/or a mutant KP2 bacterium, e.g., an environmental and/or clinical isolate as described herein, is positive for a unique genomic region that may be identified by PCR using the following primers: 5′AGCACTAGCGGCTGTGGTAT3′ and 5′ACTTACTCGGGCCCTTGATT3′. See, e.g., Atarashi et al., 2017. In some embodiments, the mutant KP2 bacterium, e.g., an environmental and/or clinical isolate identified using said primers, comprises greater than about 95%, greater than about 96%, greater than about 97%, greater than about 98%, or greater than about 99% homology to the KP2 bacterium (Table 1, contigs), e.g., % homology of the coding regions as calculated by ANI (Average Nucleotide Identity). See, e.g., Han et al., ANItools web: a web tool for fast genome comparison within multiple bacterial strains (2016). In some embodiments, a mutant KP2 bacterium identified by said primers and is at least about 99% homologous to the KP2 bacterium (Table 1, contigs) is referred to as “KP2-like” herein. In some embodiments, the mutant and/or KP2-like bacterium is capable of being lysed by at least one of the KP2 bacteriophage disclosed herein.

[0028] As used herein, “bacteriophage” and “phage” are used interchangeably and refer to an isolated virus that is capable of infecting a bacterium. In some embodiments, the phage comprises a DNA or an RNA genome. A phage may be isolated from a natural or human-made environment. In some embodiments, the phage is selected from Myoviridae, Podoviridae, and Siphoviridae. As used herein, a “KP bacteriophage” is intended to refer to a bacteriophage that is capable of lysing a Klebsiella pneumoniae or Klebsiella aeromobilis/Enterobacter aerogenes bacterium. For example, a “KP2 bacteriophage” refers to a bacteriophage that is capable of lysing a Klebsiella pneumoniae strain KP2 bacterium, including wild-type and mutant KP2 bacterium. A “KP3 bacteriophage” refers to a bacteriophage that is capable of lysing a Klebsiella aeromobilis/Enterobacter aerogenes strain KP3 bacterium, including wild-type and mutant KP3 bacterium.

[0029] It is known that different isolates of a given bacteriophage may vary at the nucleic acid sequence level. In some embodiments, bacteriophages are considered to be “functionally equivalent” as long as they exhibit similar phenotypes, e.g., similar host range, similar lytic ability, and/or threshold sequence similarity (e.g., greater than about 85%, greater than about 90%, greater than about 95%, greater than about 97%, or greater than about 99%). As used herein, the term “bacteriophage” encompasses a parent bacteriophage as well as its progeny or derivatives.

[0030] As used herein, “host range” refers to the bacteria that are susceptible to infection by a particular phage. The host range of a phage may include, but is not limited to, a strain, a species, a genus, or multiple genera of bacteria. The term encompasses phage adsorbable, non-productive infection (e.g., restrictive, abortive, lysogenic), and productive infections. In some embodiments, a phage may recognize two or more strains. In some embodiments, a phage may recognize wild-type and phage-resistant mutant strains.

[0031] Different phage isolates may be prepared and phenotyped using methods known in the art, e.g., a plaque assay, liquid media assay, solid media assay. In some embodiments, the solid media assays to quantify and isolate phage are based on plaque assays (Abedon & Yin, 2009), ranging from efficiency of plating (EOP) (Kutter, 2009) to spot testing (Hyman & Abedon, 2010). In some embodiments, the plate format used for the plaque assay can be modified, e.g., from a petri dish to a 48-well plate.

[0032] In some embodiments, a double-layer plaque assay is used to phenotype bacteriophage isolates. For example, a starter culture of 4 mL BHIS may be inoculated with 5-10 colonies from a plate. This culture may be incubated at 37° C. for 1.5-2 hours. A volume of 100 μL of this culture may be mixed with 100 μL of a phage-containing sample (or medium only control) and incubated for 15 minutes. Thereafter, 3 mL of BHIS top agar (pre-molten 0.4% agar BHIS supplemented with 1 mM Ca²⁺ and Mg²⁺ ions) may be added, and the mixture may be poured over a BHIS bottom agar plate (1.5% agar BHIS). The plates may be allowed to gel at room temperature, and then incubated for 2-3 hours at 37° C. until plaques are identified.

[0033] In some embodiments, a modified spot drop assay is used to phenotype bacteriophage isolates. For example, a starter culture of 4 mL BHIS may be inoculated with 5-10 colonies from a plate. This culture may be incubated at 37° C. for 1.5-2 hours. A volume of 100 μL of this culture may be mixed with 3 mL of BHIS top agar (pre-molten 0.4% agar BHIS supplemented with 1 mM Ca²⁺ and Mg²⁺ ions), and 100 μL of this mixture may be dispensed per well of a Nunc 48-well plate already containing 1 mL per well of BHIS bottom agar. After solidifying at room temperature, the plates may be incubated for 30 minutes at 37 degrees. At this stage, 10 μL of samples containing phage or media only controls may be dropped in the middle of the well, left to absorb, and then may be incubated for 2-3 hours until plaques are visible for counting.

[0034] In some embodiments, a liquid media assay is used to phenotype the bacteriophage. In some embodiments, liquid-based phage infection assays follow the time-course of infection and can provide more than quantitative end-points of infection as compared to the solid-phase plaque assays. In some embodiments, by mixing phage with bacteria in liquid medium, then following the turbidity of the culture over time, one can discern finer differences (e.g., a delay in the time of cell lysis) between how different bacterial strains interact with the phage. In some embodiments, the liquid media assay allows for high-throughput measurements by using 96-well plates and reading optical density in a plate reader.

[0035] For example, a bacterial strain may be grown for 1.5-2 hours until an OD₆₀₀ of about 1.7-2. This culture may then be diluted using BHIS medium to a starting optical density, typically between 0.05 and 0.2 OD₆₀₀. A volume of 200 μL of culture may then be dispensed into the wells of a Nunclon flat-bottomed 96-well plate. 10 μL of a sample containing phage or 10 μL of medium as control may be added to each well. The wells may be covered with 50 μL of mineral oil to limit evaporation, and a thin sterile optically transparent polyester film may be added to keep the culture sterile. Optical density measurements may be carried out every 15 minutes, e.g., in a Tecan Infinite M200 plate reader connected to a Tecan EVO75 robot. Between measurements, the plate may be incubated while shaking at 37° C., e.g., inside the EVO75 incubator.

[0036] In some embodiments, infectivity is determined by the plaque presence in a solid assay only. In some embodiments, infectivity is determined by the decrease in the bacterial culture optical density in a liquid assay only. In some embodiments, infectivity is determined by the decrease in the bacterial culture optical density and plaque presence in both the liquid assay and the solid assay.

[0037] As used herein, a “lytic” bacteriophage refers to a virulent bacteriophage that in the course attaches to a bacterial host and inserts its genetic material into the bacterial host cell. After that a phage usually follows one of two life cycles, lytic (virulent) or lysogenic (temperate). Lytic phages take over the machinery of the cell to make phage components. They then destroy, or lyse, the cell, releasing new phage particles. Lysogenic phages incorporate their nucleic acid into the chromosome of the host cell and replicate with it as a unit without destroying the cell. Under certain conditions lysogenic phages can be induced to follow a lytic cycle. In some embodiments, following the infection, new bacteriophage particles are released. In some embodiments, following the infection, the host bacterial cells are lysed and destroyed. In some embodiments, less than 90% of the host bacterial cells are lysed and destroyed. See, e.g., Abedon et al., 2011; Sulakvelidze et al., 2001; Green et al., 2017.

[0038] In some embodiments, the % lysis is measured by methods known in the art and described herein, e.g., by optical density (OD) or qPCR.

[0039] As used herein, “% homology” refers to the level of nucleic acid sequence identity or amino acid sequence identity between a first nucleic acid or amino acid sequence when aligned to a second nucleic acid or amino acid sequence using a sequence alignment program. When a position in the first and the second sequences is occupied by the same nucleic acid or amino acid (e.g., if a position in the first nucleic acid sequence and the second nucleic acid sequence is occupied by cytosine), then the first and the second sequences are homologous at that position.

[0040] In general, homology between two sequences is calculated from the number of matching or homologous positions shared by the two sequences over the total number of positions compared. In some embodiments, the first and the second sequences are aligned in a manner to maximize % homology. In some embodiments, % homology refers to the % identity over the shorter of two sequences. In some embodiments, the % homology for a nucleic acid sequence includes intronic and/or intergenic regions. Exemplary levels of % homology include, but are not limited to, 80, 81, 82, 83, 84, 85, 86, 87, 88, 89, 90, 91, 92, 93, 94, 95, 96, 97, 98, 99% or more sequence identity between a first and a second sequence.

[0041] Exemplary sequence alignment programs that may be used to determine % homology between two sequences include, but are not limited to, the FASTA package (including rigorous (SSEARCH, LALIGN, GGSEARCH and GLSEARCH) and heuristic (FASTA, FASTX/Y, TFASTX/Y and FASTS/M/F) algorithms, the EMBOSS package (Needle, stretcher, water and matcher), the BLAST programs (including, but not limited to BLASTN, BLASTX, TBLASTX, BLASTP, TBLASTN), megablast and BLAT. In some embodiments, the sequence alignment program is BLASTN. For example, 95% homology refers to 95% sequence identity determined by BLASTN, by combining all non-overlapping alignment segments (BLAST HSPs), summing their numbers of identical matches and dividing this sum with the length of the shorter sequence.

[0042] In some embodiments, the sequence alignment program is a basic local alignment program, e.g., BLAST. In some embodiments, the sequence alignment program is a pairwise global alignment program. In some embodiments, the pairwise global alignment program is used for protein-protein alignments. In some embodiments, the pairwise global alignment program is Needle. In some embodiments, the sequence alignment program is a multiple alignment program. In some embodiments, the multiple alignment program is MAFFT. In some embodiments, the sequence alignment program is a whole genome alignment program. In some embodiments, the whole genome alignment is performed using BLASTN. In some embodiments, BLASTN is utilized without any changes to the default parameters.

[0043] As used herein, a “pharmaceutical composition” refers to a preparation of the bacteriophage of the invention with other components such as a physiologically suitable carrier and/or excipient.

[0044] “Physiologically acceptable carrier” and “pharmaceutically acceptable carrier” are used interchangeably herein to refer to a carrier or a diluent that does not cause significant irritation to an organism and does not abrogate the biological activity and properties of the administered bacteriophage composition. An adjuvant is included under these phrases.

[0045] The term “excipient” refers to an inert substance added to a pharmaceutical composition to further facilitate administration of an active ingredient. Examples include, but are not limited to, calcium bicarbonate, calcium phosphate, various sugars and types of starch, cellulose derivatives, gelatin, vegetable oils, polyethylene glycols, and surfactants, including, e.g., polysorbate 20.

[0046] The terms “therapeutically effective dose” and “therapeutically effective amount” are used to refer to an amount of a compound that results in prevention, delay of onset of symptoms, or amelioration of symptoms of IBD compared to an untreated control. A therapeutically effective amount may, for example, be sufficient to treat, prevent, reduce the severity, delay the onset, and/or reduce the risk of occurrence of one or more symptoms of IBD compared to an untreated control.

[0047] As used herein, “intestine” refers to the gastrointestinal tract of a mammal and encompasses the organs, glands, tracts, and systems that are responsible for the transfer and digestion of food, absorption of nutrients, and excretion of waste. In humans, the “intestine” comprises the gastrointestinal tract, which starts at the mouth and ends at the anus, and additionally comprises the esophagus, stomach, small intestine, and large intestine. The upper gastrointestinal tract comprises the esophagus, stomach, and duodenum of the small intestine. The lower gastrointestinal tract comprises the remainder of the small intestine, i.e., the jejunum and ileum, and all of the large intestine, i.e., the cecum, colon, rectum, and anal canal. Bacteria can be found throughout the intestine. As used herein, mouth encompasses the tissues in the mouth, e.g., any soft tissue in the mouth of a mammal, the pharynx, etc.

[0048] In some embodiments, different portions of the intestine may be associated with disease. In CD, for example, the bacteriophage may be formulated to target bacteria present in the small intestine, colon, ileum, ileocecal junction, esophagus, mouth, and/or anus. In UC, for example, the bacteriophage may be formulated to target bacteria present in the colon, rectum, anus, and large intestine of a mammal.

[0049] The articles “a” and “an,” as used herein, should be understood to mean “at least one,” unless clearly indicated to the contrary.

[0050] The phrase “and/or,” when used between elements in a list, is intended to mean either (1) that only a single listed element is present, or (2) that more than one element of the list is present. For example, “A, B, and/or C” indicates that the selection may be A alone; B alone; C alone; A and B; A and C; B and C; or A, B, and C. The phrase “and/or” may be used interchangeably with “at least one of” or “one or more of” the elements in a list.

[0051] All ranges include end points. All references cited are incorporated for any purpose (specification controls where there are inconsistencies). Singular form includes plural.

[0052] Bacteriophage

[0053] The bacteriophage described herein is capable of lysing one or more Klebsiella bacterial strains that are associated with IBD, e.g., ulcerative colitis, Crohn's disease. In some embodiments, the bacteriophage is capable of lysing one or more Klebsiella pneumoniae bacterial strains that are associated with IBD. In some embodiments, the bacteriophage is capable of lysing one or more Klebsiella aeromobilis bacterial strains that are associated with IBD. In some embodiments, the bacteriophage is capable of modulating IBD by lysing the one or more Klebsiella bacteria in a mammal. In some embodiments, the bacteriophage is capable of modulating IBD by lysing the one or more Klebsiella bacteria in the intestine of a mammal. In some embodiments, the bacteriophage is capable of modulating IBD by lysing the one or more Klebsiella bacteria in the mouth of a mammal.

[0054] In some embodiments, the bacteriophage is capable of modulating IBD associated with proton pump inhibitor (PPI) therapy (Juillerat et al., 2012) by lysing the one or more Klebsiella bacteria. In some embodiments, the bacteriophage is capable of modulating IBD associated with primary sclerosing cholangitis (Hirschfield et al., 2013; Palmela et al., 2017) by lysing the one or more Klebsiella bacteria.

[0055] In some embodiments, the bacteriophage is selected from KP2W-P0101, KP2W-P0102, KP2W-P0103, KP2W-P0104, KP2W-P0105, KP2W-P0106, KP2W-P0107, KP2W-P0108, and KP2W-P0109. In some embodiments, the bacteriophage is additionally selected from a bacteriophage that comprises at least about 83%, at least about 85%, at least about 88%, at least about 90%, at least about 95%, at least about 97%, or at least about 99% homology to the sequence of KP2W-P0101 as measured by BLASTN. The bacteriophages identified in this paragraph are referred to as “Group 1” bacteriophage and are capable of infecting the bacterial strains described herein, see, e.g., FIG. 3 and FIG. 5.

[0056] In some embodiments, the bacteriophage is selected from KP2M-P0201, KP2W-P0202, KP2M-P0203, KP2M-P0204, KP2M-P0205, KP2M-P0206, KP2M-P0207, KP2M-P0208, KP2M-P0209, KP2M-P0210, KP2M-P0211, KP2M-P0212. In some embodiments, the bacteriophage is additionally selected from a bacteriophage that comprises at least about 85%, at least about 86%, at least about 88%, at least about 90%, at least about 95%, at least about 97%, or at least about 99% homology to the sequence of KP2M-P0201 as measured by BLASTN. The bacteriophages identified in this paragraph are referred to as “Group 2” bacteriophage and are capable of infecting the bacterial strains described herein, see, e.g., FIG. 3 and FIG. 5.

[0057] In some embodiments, the bacteriophage is selected from KP2W-M0102, KP2W-M0103, KP2W-M0104, KP2M-M0105, KP2W-M0106, KP2W-M0107, KP2M-M0108, KP2M-M0109, KP2M-M0110, KP2M-M0111, KP2M-M0112. In some embodiments, the bacteriophage is additionally selected from a bacteriophage that comprises at least about 86%, at least about 88%, at least about 90%, at least about 95%, at least about 97%, or at least about 99% homology to the sequence of KP2W-M0102 as measured by BLASTN. The bacteriophages identified in this paragraph are referred to as “Group 3” bacteriophage and are capable of infecting the bacterial strains described herein, see, e.g., FIG. 3 and FIG. 5.

[0058] In some embodiments, the bacteriophage is selected from KP3W-P0101, KP3W-P0102, KP3W-P0103, KP3W-P0104, KP3W-P0105, KP3W-P0106, KP3W-P0107, KP3W-P0108, KP3W-P0109, KP3W-P0110, KP3W-P0111, KP3W-P0112, KP3W-P0113, KP3W-P0114, KP3W-P0201, KP3W-P0202, and KP3W-P0203. In some embodiments, the bacteriophage comprises at least about 78%, at least about 80%, at least about 82%, at least about 85%, at least about 88%, at least about 90%, at least about 95%, at least about 97%, or at least about 99% homology to the sequence of KP3W-P0101 as measured by BLASTN. In some embodiments, the bacteriophage comprises at least about 95%, at least about 96%, at least about 97%, or at least about 99% homology to the sequence of KP3W-P0201 as measured by BLASTN. The bacteriophages identified in this paragraph are referred to as “Group 4” bacteriophage and are capable of infecting the bacterial strains described herein. See, e.g., FIG. 3 and FIG. 6.

[0059] In some embodiments, the bacteriophage is selected from KP3W-S0101, and KP3W-S0102. In some embodiments, the bacteriophage is additionally selected from a bacteriophage that comprises at least about 88%, at least about 90%, at least about 95%, at least about 97%, or at least about 99% homology to the sequence of KP3W-P0201 as measured by BLASTN. The bacteriophages identified in this paragraph are referred to as “Group 5” bacteriophage and are capable of infecting the bacterial strains described herein. See, e.g., FIG. 3 and FIG. 6.

[0060] In some embodiments, the bacteriophage is capable of infecting KP2, but not capable of infecting any of ATCC BAA-2552 (KP1), KP3, ATCC 23356 (KP4), ATCC 13882 (KP5), ATCC BAA-1705 (KP6), ATCC 700603 (KP7), or ATCC 700721 (KP8). See, e.g., FIG. 3 and FIG. 5.

[0061] In some embodiments, the bacteriophage is capable of infecting KP3, but not capable of infecting any of ATCC BAA-2552 (KP1), KP2, ATCC 23356 (KP4), ATCC 13882 (KP5), ATCC BAA-1705 (KP6), ATCC 700603 (KP7), or ATCC 700721 (KP8). See, e.g., FIG. 3 and FIG. 5.

[0062] In some embodiments, the bacteriophage is capable of infecting KP2 and KP4, but not capable of infecting any of ATCC BAA-2552 (KP1), KP3, ATCC 13882 (KP5), ATCC BAA-1705 (KP6), ATCC 700603 (KP7), or ATCC 700721 (KP8). See, e.g., FIG. 3 and FIG. 5.

[0063] In some embodiments, during phage infection, mutant bacterial strains arise that are resistant to the phage. In some embodiments, it is beneficial for a phage to target the mutant bacteria. To produce said phage, bacteria may be incubated with one or more phage(s) disclosed herein to generate mutant bacterial strains. Environmental and clinical samples may then be screened for phage that are capable of infecting the mutant bacterial strains in order to identify the new phage. Then the titer of the phage(s) is selected to allow for efficient attachment, penetration, amplification and release of new phage(s) from the bacterial cells. Exemplary mutant KP2 strains are described herein. See, e.g., Table 1 (contigs). In some embodiments, the mutant bacterial strain mirrors mutations that are likely to occur in vivo when a subject is treated with the phage disclosed herein. In some embodiments, a bacteriophage may be generated that is capable of infecting and lysing the mutant bacterial strain. Thus, in some embodiments, the bacteriophages provided herein are capable of treating unmodified KP2 and/or KP3 bacteria, as well as resistant KP2 and/or KP3 mutants.

[0064] In some embodiments, the bacteriophage is capable of infecting KP2 and at least one bacteria, at least two bacteria, at least three bacteria, at least four bacteria, or at least five bacteria selected from MKP2_2161_1, MKP2_2161_C, MKP2_251_B, MKP2_251 S, MKP2_251_D, and MKP2_coc_1. See, e.g., FIG. 5.

[0065] In some embodiments, the bacteriophage is capable of infecting KP2, KP4, and at least one bacteria, at least two bacteria, at least three bacteria, at least four bacteria, or at least five bacteria selected from MKP2_2161_1, MKP2_2161_C, MKP2_251_B, MKP2_251_C, MKP2_251_D, and MKP2_coc_1. See, e.g., FIG. 5.

[0066] In some embodiments, the bacteriophage is capable of infecting at least one bacteria selected from MKP2_2161_1, MKP2_2161_C, MKP2_251_B, MKP2_251 S, MKP2_251_D, and MKP2_coc_1. See, e.g., FIG. 5.

[0067] As used herein, a lytic bacteriophage “cocktail” refers to a composition comprising at least two different isolates of lytic bacteriophage as described herein. As used herein, “a” or “one” bacteriophage refers to an isolate or type of bacteriophage and is not necessarily intended to refer to a single bacteriophage particle.

[0068] In some embodiments, the cocktail comprises at least two different KP2 bacteriophages described herein and is capable of infecting wild-type KP2 bacteria. In some embodiments, the cocktail comprises at least two different KP2 bacteriophages described herein and is capable of infecting mutant KP2 bacteria. In some embodiments, the cocktail comprises at least two different KP2 bacteriophages described herein and is capable of infecting wild-type KP2 bacteria and mutant KP2 bacteria.

[0069] In some embodiments, the cocktail comprises at least two different KP3 bacteriophages described herein and is capable of infecting wild-type KP3 bacteria. In some embodiments, the cocktail comprises at least two different KP3 bacteriophages described herein and is capable of infecting mutant KP3 bacteria. In some embodiments, the cocktail comprises at least two different KP3 bacteriophages described herein and is capable of infecting wild-type KP3 bacteria and mutant KP3 bacteria.

[0070] In some embodiments, the cocktail comprises at least two different types of KP2 bacteriophages and no KP3 bacteriophages. In some embodiments, the cocktail comprises at least two different types of KP3 bacteriophages and no KP2 bacteriophages. In some embodiments, the cocktail comprises at least one type of KP2 bacteriophage and at least one type of KP3 bacteriophage. In some embodiments, the cocktail comprises only one type of KP2 bacteriophage and only one type of KP3 bacteriophage. In some embodiments, a cocktail comprising at least two phages widens the host range as compared to a single phage. In some embodiments, a cocktail comprising at least two phages reduces the appearance of phage-resistant bacteria as compared to a single phage.

[0071] In some embodiments, the cocktail comprises at least one KP2 bacteriophage and at least one KP3 bacteriophage described herein and is capable of infecting wild-type KP2 bacteria and wild-type KP3 bacteria. In some embodiments, the cocktail comprises at least one KP2 bacteriophage and at least one KP3 bacteriophage described herein and is capable of infecting wild-type KP2 bacteria, mutant phage-resistant KP2, and/or wild-type KP3 bacteria. In some embodiments, the cocktail comprises at least one KP2 bacteriophage and at least one KP3 bacteriophage described herein and is capable of infecting wild-type KP2 bacteria, mutant phage-resistant KP2, wild-type KP3 bacteria, and/or mutant phage-resistant KP3.

[0072] In some embodiments, the cocktail comprises KP2W-P0105+KP2M-P0203; KP2M-P0203+KP2W-M0104; KP2W-P0105+KP2W-M0104; KP2W-P0102+KP2M-P0209; KP2M-P0209+KP2W-M0107; KP2W-P0102+KP2W-M0107; KP2W-P0109+KP2M-P0211; KP2M-P0211+KP2M-M0112; or KP2W-P0109+KP2M-M0112. In some embodiments, the cocktail comprises at least one bacteriophage selected from KP2W-P0105, KP2W-P0102, and KP2W-P0109; at least one bacteriophage selected from KP2M-P0203, KP2M-P0209, and KP2M-P0211; and at least one bacteriophage selected from KP2W-M0104, KP2W-M0107, and KP2M-M0112. In some embodiments, the cocktail comprises KP2W-P0105+KP2M-P0203+KP2W-M0104; KP2W-P0102+KP2M-P0209+KP2W-M0107; KP2W-P0109+KP2M-P0211+KP2M-M0112; KP2W-P0105+KP2M-P0209+KP2M-M0112 KP2W-P0102+KP2M-P0211+KP2W-M0104; or KP2W-P0109+KP2M-P0203+KP2W-M0107.

[0073] In some embodiments, the bacteriophage or cocktail does not significantly affect the subject's microbiota. In some embodiments, the bacteriophage or cocktail does not significantly affect the subject's commensal bacteria. In some embodiments, the bacteriophage or cocktail does not significantly affect the subject's probiotic bacteria. In some embodiments, a bacteriophage or cocktail is not naturally capable of affecting the microbiota, commensal bacteria, or probiotic bacteria, because the bacteriophage's natural host range is limited, e.g., to KP2 or KP3.

[0074] In some embodiments, a bacteriophage that is specific for a bacterium is capable of recognizing specific receptors and/or attachment sites expressed exclusively by said bacterium. In some embodiments, the KP2 bacteriophage is “specific” for KP2 bacteria. For example, the KP2 bacteriophage is capable of infecting and/or productively creating more virions in the KP2 bacteria in an in vitro or in vivo assay, e.g., in a plaque assay, an OD assay, a phage-adsorption assay, or any other assay showing that the bacteriophage can enter, reproduce, and exit the bacteria. In some embodiments, the KP3 bacteriophage is “specific” for KP3 bacteria. For example, the KP3 bacteriophage is capable of infecting and/or productively creating more virions in the KP3 bacteria in an in vitro or in vivo assay, e.g., in a plaque assay, an OD assay, a phage-adsorption assay, or any other assay showing that the bacteriophage can enter, reproduce, and exit the bacteria.

[0075] Bacterial Lysis

[0076] In some embodiments, the bacteriophage provided herein is capable of lysing deleterious Klebsiella bacteria that induce immune and/or inflammatory response(s). In some embodiments, the bacteriophage provided herein is capable of lysing deleterious Klebsiella bacteria that disrupt the balance of immune homeostasis in the intestine, e.g., by enhancing the pro-inflammatory activity, ultimately resulting in chronic intestinal inflammation. In some embodiments, the bacteriophage provided herein is capable of lysing deleterious Klebsiella bacteria that induce a T helper 1 (TH1) cell response. In some embodiments, the Klebsiella bacteria to be lysed by the bacteriophage provided herein are in the lumen. In some embodiments, the Klebsiella bacteria to be lysed by the bacteriophage provided herein are associated with the epithelium. In some embodiments, the Klebsiella bacteria to be lysed by the bacteriophage provided herein are in between the mucosal and submucosal layer in the ileum, e.g., in Crohn's disease (Chiodini et al., 2015).

[0077] In some embodiments, the bacteriophage provided herein is capable of lysing deleterious KP2 and/or KP3 bacteria that are associated with IBD, e.g., ulcerative colitis or Crohn's disease, and may be administered to ameliorate the disease or at least one symptom thereof. In some embodiments, there is a higher incidence of KP2 bacteria associated with Crohn's disease as compared to ulcerative colitis. However, in embodiments where a subject has ulcerative colitis associated with KP2 bacterial presence, the bacteriophage provided herein may be administered to lyse those bacteria and ameliorate the ulcerative colitis or at least one symptom thereof.

[0078] Drugs that inhibit gastric acid secretion, e.g., proton pump inhibitors, and primary sclerosing cholangitis (PSC) may alter the course of IBD. In some embodiments, the bacteriophage provided herein is capable of lysing deleterious KP2 and/or KP3 bacteria that are associated proton pump inhibitor therapy or PSC, and may be administered to ameliorate at least one symptom of IBD associated with proton pump inhibitor therapy or PSC.

[0079] Pharmaceutical Compositions

[0080] Pharmaceutical compositions comprising the bacteriophage described herein may be used to modulate IBD. Pharmaceutical compositions comprising one or more bacteriophage, alone or in combination with prophylactic agents, therapeutic agents, and/or and pharmaceutically acceptable carriers are provided. In certain embodiments, the pharmaceutical composition comprises one bacteriophage described herein. In alternate embodiments, the pharmaceutical composition comprises two or more bacteriophages described herein.

[0081] The pharmaceutical compositions described herein may be formulated in a conventional manner using one or more physiologically acceptable carriers comprising excipients and auxiliaries, which facilitate processing of the active ingredients into compositions for pharmaceutical use. Methods of formulating pharmaceutical compositions are known in the art (see, e.g., “Remington's Pharmaceutical Sciences,” Mack Publishing Co., Easton, Pa.). In some embodiments, the pharmaceutical compositions are subjected to tableting, lyophilizing, direct compression, conventional mixing, dissolving, granulating, levigating, emulsifying, encapsulating, entrapping, or spray drying to form tablets, granulates, nanoparticles, nanocapsules, microcapsules, microtablets, pellets, or powders, which may be enterically coated or uncoated. Appropriate formulation depends on the route of administration.

[0082] The bacteriophage described herein may be formulated into pharmaceutical compositions in any suitable dosage form (e.g., liquids, capsules, sachet, hard capsules, soft capsules, tablets, enteric coated tablets, suspension powders, granules, or matrix sustained release formations for oral administration) and for any suitable type of administration (e.g., oral, topical, injectable, immediate-release, pulsatile-release, delayed-release, or sustained release). In some embodiments the bacteriophage are formulated for administration as an oral rinse, a lozenge, a strip, or gum. The composition may be administered once or more daily, weekly, or monthly.

[0083] The bacteriophage may be formulated into pharmaceutical compositions comprising one or more pharmaceutically acceptable carriers, thickeners, diluents, buffers, buffering agents, surface active agents, neutral or cationic lipids, lipid complexes, liposomes, penetration enhancers, carrier compounds, and other pharmaceutically acceptable carriers or agents. For example, the pharmaceutical composition may include, but is not limited to, the addition of calcium bicarbonate, sodium bicarbonate, calcium phosphate, various sugars and types of starch, cellulose derivatives, gelatin, vegetable oils, polyethylene glycols, and surfactants, including, for example, polysorbate 20. In some embodiments, the bacteriophage may be formulated in a solution of sodium bicarbonate, e.g., 1 molar solution of sodium bicarbonate (to buffer an acidic cellular environment, such as the stomach, for example). The bacteriophage may be administered and formulated as neutral or salt forms. Pharmaceutically acceptable salts include those formed with anions such as those derived from hydrochloric, phosphoric, acetic, oxalic, tartaric acids, etc., and those formed with cations such as those derived from sodium, potassium, ammonium, calcium, ferric hydroxides, isopropylamine, triethylamine, 2-ethylamino ethanol, histidine, procaine, etc.

[0084] The bacteriophage may be administered orally and formulated as tablets, pills, dragees, capsules, liquids, gels, syrups, slurries, suspensions, etc. Pharmacological compositions for oral use can be made using a solid excipient, optionally grinding the resulting mixture, and processing the mixture of granules, after adding suitable auxiliaries if desired, to obtain tablets or dragee cores. Suitable excipients include, but are not limited to, fillers such as sugars, including lactose, sucrose, mannitol, or sorbitol; cellulose compositions such as maize starch, wheat starch, rice starch, potato starch, gelatin, gum tragacanth, methyl cellulose, hydroxypropylmethyl-cellulose, sodium carbomethylcellulose; and/or physiologically acceptable polymers such as polyvinylpyrrolidone (PVP) or polyethylene glycol (PEG). Disintegrating agents may also be added, such as cross-linked polyvinylpyrrolidone, agar, alginic acid or a salt thereof such as sodium alginate.

[0085] In some embodiments, the bacteriophage is formulated for delivery to a mammalian mouth. In some embodiments, the pharmaceutical composition comprises the bacteriophage and a pharmaceutically acceptable excipient, wherein the bacteriophage and the pharmaceutically acceptable excipient do not occur together in nature. In some embodiments, the pharmaceutical composition comprises the bacteriophage and a pharmaceutically acceptable excipient, wherein the pharmaceutically acceptable excipient is a non-naturally occurring excipient.

[0086] In some embodiments, the bacteriophage is formulated for delivery to a mammalian intestine. In some embodiments, the pharmaceutical composition comprises the bacteriophage and a pharmaceutically acceptable excipient, wherein the bacteriophage and the pharmaceutically acceptable excipient do not occur together in nature. In some embodiments, the pharmaceutical composition comprises the bacteriophage and a pharmaceutically acceptable excipient, wherein the pharmaceutically acceptable excipient is a non-naturally occurring excipient.

[0087] Tablets or capsules can be prepared by conventional means with pharmaceutically acceptable excipients such as binding agents (e.g., pregelatinized maize starch, polyvinylpyrrolidone, hydroxypropyl methylcellulose, carboxymethylcellulose, polyethylene glycol, sucrose, glucose, sorbitol, starch, gum, kaolin, and tragacanth); fillers (e.g., lactose, microcrystalline cellulose, or calcium hydrogen phosphate); lubricants (e.g., calcium, aluminum, zinc, stearic acid, polyethylene glycol, sodium lauryl sulfate, starch, sodium benzoate, L-leucine, magnesium stearate, talc, or silica); disintegrants (e.g., starch, potato starch, sodium starch glycolate, sugars, cellulose derivatives, silica powders); or wetting agents (e.g., sodium lauryl sulphate). The tablets may be coated by methods well known in the art. A coating shell may be present, and common membranes include, but are not limited to, polylactide, polyglycolic acid, polyanhydride, other biodegradable polymers, alginate-polylysine-alginate (APA), alginate-polymethylene-co-guanidine-alginate (A-PMCG-A), hydroxymethylacrylate-methyl methacrylate (HEMA-MMA), multilayered HEMA-MMA-MAA, polyacrylonitrilevinylchloride (PAN-PVC), acrylonitrile/sodium methallylsulfonate (AN-69), polyethylene glycol/poly pentamethylcyclopentasiloxane/polydimethylsiloxane (PEG/PD5/PDMS), poly N,N-dimethyl acrylamide (PDMAAm), siliceous encapsulates, cellulose sulphate/sodium alginate/polymethylene-co-guanidine (CS/A/PMCG), cellulose acetate phthalate, calcium alginate, k-carrageenan-locust bean gum gel beads, gellan-xanthan beads, poly(lactide-co-glycolides), carrageenan, starch poly-anhydrides, starch polymethacrylates, polyamino acids, and enteric coating polymers.

[0088] In some embodiments, the bacteriophage is enterically coated for release into the gut or a particular region of the gut. The typical pH profile from the stomach to the colon is about 1-4 (stomach), 5.5-6 (duodenum), 7.3-8.0 (ileum), and 5.5-6.5 (colon). In some diseases, the pH profile may be modified. In some embodiments, the coating is degraded in specific pH environments in order to specify the site of release.

[0089] Liquid preparations for oral administration may take the form of solutions, syrups, suspensions, or a dry product for constitution with water or other suitable vehicle before use. Such liquid preparations may be prepared by conventional means with pharmaceutically acceptable agents such as suspending agents (e.g., sorbitol syrup, cellulose derivatives, or hydrogenated edible fats); emulsifying agents (e.g., lecithin or acacia); non-aqueous vehicles (e.g., almond oil, oily esters, ethyl alcohol, or fractionated vegetable oils); and preservatives (e.g., methyl or propyl-p-hydroxybenzoates or sorbic acid). The preparations may also contain buffer salts, flavoring, coloring, and sweetening agents as appropriate. Preparations for oral administration may be suitably formulated for slow release, controlled release, or sustained release of the bacteriophage.

[0090] In certain embodiments, the bacteriophage may be orally administered, for example, with an inert diluent or an assimilable edible carrier. The compound may also be enclosed in a hard or soft shell gelatin capsule, compressed into tablets, or incorporated directly into the subject's diet. For oral therapeutic administration, the compounds may be incorporated with excipients and used in the form of ingestible tablets, buccal tablets, troches, capsules, elixirs, suspensions, syrups, wafers, and the like. To administer a compound by other than parenteral administration, it may be necessary to coat the compound with, or co-administer the compound with, a material to prevent its inactivation. In some embodiments, the bacteriophage is orally administered for delivery to the mouth and is capable of lysing bacteria present in the mouth. In some embodiments, the bacteriophage is orally administered for delivery to the intestine and is capable of lysing bacteria present in the intestine.

[0091] In some embodiments, the composition is formulated for intraintestinal administration, intrajejunal administration, intraduodenal administration, intraileal administration, gastric shunt administration, or intracolic administration, via nanoparticles, nanocapsules, microcapsules, or microtablets, which are enterically coated or uncoated. The pharmaceutical compositions may also be formulated in rectal compositions such as suppositories or retention enemas, using, e.g., conventional suppository bases such as cocoa butter or other glycerides. The compositions may be suspensions, solutions, or emulsions in oily or aqueous vehicles, and may contain suspending, stabilizing and/or dispersing agents.

[0092] In some embodiments, the pharmaceutically acceptable composition is in single dosage form. Single dosage forms may be in a liquid or a solid form. Single dosage forms may be administered directly to a patient without modification or may be diluted or reconstituted prior to administration. In certain embodiments, a single dosage form may be administered in bolus form, e.g., single injection, single oral dose, including an oral dose that comprises multiple tablets, capsule, pills, etc. In alternate embodiments, a single dosage form may be administered over a period of time, e.g., by infusion. Single dosage forms of the pharmaceutical composition may be prepared by portioning the pharmaceutical composition into smaller aliquots, single dose containers, single dose liquid forms, or single dose solid forms, such as tablets, granulates, nanoparticles, nanocapsules, microcapsules, microtablets, pellets, or powders, which may be enterically coated or uncoated. A single dose in a solid form may be reconstituted by adding liquid, typically sterile water or saline solution, prior to administration to a patient.

[0093] In other embodiments, the composition can be delivered in a controlled release or sustained release system. In one embodiment, a pump may be used to achieve controlled or sustained release. In another embodiment, polymeric materials can be used to achieve controlled or sustained release of the therapies of the present disclosure (see, e.g., U.S. Pat. No. 5,989,463). Examples of polymers used in sustained release formulations include, but are not limited to, poly(2-hydroxy ethyl methacrylate), poly(methyl methacrylate), poly(acrylic acid), poly(ethylene-co-vinyl acetate), poly(methacrylic acid), polyglycolides (PLG), polyanhydrides, poly(N—vinyl pyrrolidone), poly(vinyl alcohol), polyacrylamide, poly(ethylene glycol), polylactides (PLA), poly(lactide-co-glycolides) (PLGA), and polyorthoesters. The polymer used in a sustained release formulation may be inert, free of leachable impurities, stable on storage, sterile, and biodegradable. In some embodiments, a controlled or sustained release system can be placed in proximity of the prophylactic or therapeutic target, thus requiring only a fraction of the systemic dose. Any suitable technique known to one of skill in the art may be used.

[0094] Dosage regimens may be adjusted to provide a therapeutic response. Dosing can depend on several factors, including severity and responsiveness of the disease, route of administration, time course of treatment (days to months to years), and time to amelioration of the disease. For example, a single bolus may be administered at one time, several divided doses may be administered over a predetermined period of time, or the dose may be reduced or increased as indicated by the therapeutic situation.

[0095] In some embodiments, the ingredients are supplied either separately or mixed together in unit dosage form. The pharmaceutical compositions may be packaged in a hermetically sealed container such as an ampoule or sachet indicating the quantity of the agent. In one embodiment, one or more of the pharmaceutical compositions is supplied as a dry sterilized lyophilized powder or water-free concentrate in a hermetically sealed container and can be reconstituted (e.g., with water or saline) to the appropriate concentration for administration to a subject. In an embodiment, one or more of the prophylactic or therapeutic agents or pharmaceutical compositions is supplied as a dry sterile lyophilized powder in a hermetically sealed container and reconstituted prior to administration. Cryoprotectants can be included for a lyophilized dosage form, principally 0-10% sucrose (optimally 0.5-1.0%). Other suitable cryoprotectants include trehalose and lactose. Other suitable bulking agents include glycine and arginine, either of which can be included at a concentration of 0-0.05%, and polysorbate-80 (optimally included at a concentration of 0.005-0.01%). Additional surfactants include but are not limited to polysorbate 20 and BRIJ surfactants. The pharmaceutical composition may be prepared as an injectable solution and can further comprise an agent useful as an adjuvant, such as those used to increase absorption or dispersion, e.g., hyaluronidase.

[0096] Method of Treatment

[0097] Methods of treating IBD in a mammal using a bacteriophage, a bacteriophage cocktail, and/or a pharmaceutical composition comprising a bacteriophage or a bacteriophage cocktail are provided. In some embodiments, a method of treating IBD comprises administering to a subject the KP2 and/or KP3 bacteriophage described herein. In some embodiments, a method of treating Crohn's disease comprises administering to a subject the KP2 and/or KP3 bacteriophage described herein. In some embodiments, a method of treating ulcerative colitis comprises administering to a subject the KP2 and/or KP3 bacteriophage described herein. In some embodiments, a method of treating IBD associated with primary sclerosing cholangitis comprises administering to a subject the KP2 and/or KP3 bacteriophage described herein. In some embodiments, IBD may be associated with proton pump inhibitor therapy, and a subject may be administered the KP2 and/or KP3 bacteriophage described herein before, during, or after proton pump inhibitor therapy.

[0098] In some embodiments, a method of treating IBD comprises administering to a mammal determined to be infected with Klebsiella bacteria the bacteriophage, the bacteriophage cocktail, and/or the pharmaceutical composition comprising a bacteriophage or a bacteriophage cocktail described herein. In some embodiments, a method of treating IBD comprises administering to a mammal determined to be infected with Klebsiella pneumoniae bacteria the bacteriophage, the bacteriophage cocktail, and/or the pharmaceutical composition comprising a bacteriophage or a bacteriophage cocktail described herein. In some embodiments, a method of treating IBD comprises administering to a mammal determined to be infected with Klebsiella pneumoniae KP2 bacteria the bacteriophage, the bacteriophage cocktail, and/or the pharmaceutical composition comprising a bacteriophage or a bacteriophage cocktail described herein. In some embodiments, a method of treating IBD comprises administering to a mammal determined to be infected with Klebsiella aeromobilis bacteria the bacteriophage, the bacteriophage cocktail, and/or the pharmaceutical composition comprising a bacteriophage or a bacteriophage cocktail described herein. In some embodiments, a method of treating IBD comprises administering to a mammal determined to be infected with Klebsiella aeromobilis KP3 bacteria the bacteriophage, the bacteriophage cocktail, and/or the pharmaceutical composition comprising a bacteriophage or a bacteriophage cocktail described herein.

[0099] In some embodiments, the bacteriophage and the method of treatment is used prophylactically. For example, the method comprises administering to a mammal determined to be susceptible to IBD the bacteriophage, the bacteriophage cocktail, and/or the pharmaceutical composition comprising a bacteriophage or a bacteriophage cocktail described herein.

[0100] In some embodiments, susceptibility to IBD is measured by the genetic susceptibility to acquire IBD, as determined by the presence of mutations in the genes or loci associated with the immune function in the intestine including loci and genes involved in inflammation and immunoregulation, tissue remodeling, tumorigenesis and apoptosis (for example, NOD2, HLA-27, ATG16L1, interleukins, CCL and CCR genes, SOD genes, MMPs, JAK, STAT, TIMP genes and many others as described in Suzuki et al., 2012) and genes associated with autophagy (Jostins et al., 2012); presence of other immune conditions (sibling diseases) such as autoimmune disorder, Behcet's disease, graft versus host disease, systemic lupus erythematosus, dermatomyositis, polymyositis, auto-immune chronic active hepatitis, pemphigus vulgaris, polyarteritis nodosa, auto-immune hemolytic anaemia, idiopathic thrombocytopenic purpura, myasthenia gravis, lupus nephritis, platelet transfusion refractoriness type 1 diabetes, ankylosing spondylitis, multiple sclerosis, psoriasis, psoriatic arthritis, asthma, and rheumatoid arthritis (Suzuki et al., 2012); acute gastroenteritis (Raposo et al., 2017); dietary constituents that have been shown to affect the immune response and the inflammatory status, through the modulation of the microbiota, for example high carbohydrate and animal fat diet, high intake of red meat and processed meat, protein, alcoholic beverages, sulfur, and sulfate, processed food (Raposo et al., 2017); lifestyle habits (Western hygiene standards and improved sanitary conditions); medications (antibiotics and steroids) especially when used in childhood leading to the alterations in the microbiome composition (Raposo et al., 2017); epigenetic mechanisms dependent on the nutrients e.g. folates and selenium (DNA methylation (Raposo et al., 2017); pollutants, sedentary lifestyle and tobacco-smoking (Raposo et al., 2017); geography (Hold at al., 2014); history of the IBD in the family (Baumgart and Sandborn, 2012; Neurath, 2014).

[0101] In some embodiments, the bacteriophage is administered more than once to achieve a desired therapeutic effect. For example, when a host bacterium is destroyed, the bacteriophage that infected said bacterium can no longer multiply because its host has been eradicated and may be eliminated from the digestive tract, and the bacteriophage may need to be re-administered, e.g., at least twice daily, at least daily, at least weekly, or at least monthly.

[0102] In some embodiments, the phage described herein may be administered in combination with one or more known and suitable medicaments for IBD, including anti-inflammatory drugs, dietary therapy, probiotics, etc.

[0103] Methods of Determining a Subject to be Treated with Phage

[0104] Methods of selecting subjects that are responsive to treatment are provided herein. In some embodiments, the method of selecting a subject that is responsive to treatment by the methods set forth herein comprises (1) obtaining a biological sample, e.g., from the intestine or mouth of the subject, (2) culturing the bacteria obtained from the biological sample, (3) inoculating the cultured bacteria with a bacteriophage described herein, and (4) determining the amount of cultured bacteria that are lysed by the bacteriophage. In some embodiments, the lysis is determined by a liquid media assay and/or a solid media assay as described herein. In some embodiments, the amount of lysis using the bacteria cultured from the intestinal sample is compared to a control, e.g., a sample obtained from a different, uninfected subject or a sample from the same subject prior to infection. In some embodiments, the phage described herein is suitable for treating KP infection if any lysis is mediated by the phage in vitro and/or in vivo. In some embodiments, a subject is determined to be infected with Klebsiella if a detectable portion of bacteria cultured from the subject are lysed by the bacteriophage. In some embodiments, a subject is determined to be infected with Klebsiella pneumoniae KP2 if a detectable portion of the cultured bacteria are lysed by a KP2 bacteriophage, see, e.g., Table 5. In some embodiments, a subject is determined to be infected with Klebsiella aeromobilis KP3 if a detectable portion of the cultured bacteria are lysed by a KP3 bacteriophage, e.g., KP3W-P0101, KP3W-P0102, KP3W-P0103, KP3W-P0104, KP3W-P0105, KP3W-P0106, KP3W-P0107, KP3W-P0108, KP3W-P0109, KP3W-P0110, KP3W-P0111, KP3W-P0112, KP3W-P0113, KP3W-P0114, KP3W-P0201, KP3W-P0202, KP3W-P0203, KP3W-S0101, KP3W-S0101, or variants or mutants thereof.

[0105] In some embodiments, the biological sample is an oral sample or expectorate, a biopsy, or stool. In some embodiments, determining the amount of cultured bacteria that are lysed by the bacteriophage comprises performing a KP2-specific qPCR of the bacterial sample, a KP3-specific qPCR of the bacterial sample, and/or a direct test for phage sensitivity using the plaque assay or liquid OD method described herein. In some embodiments, a positive sample or subject to be treated is determined by the presence of plaque in a plaque assay. In some embodiments, a positive sample or subject to be treated is determined by a reduction in OD in a liquid OD assay. In some embodiments, serotype-based screening is performed using an assay, e.g., an immunoassay, an ELISA, to determine the presence of antibodies against KP2, KP3, and/or their respective capsular types. In some embodiments, the phage is labeled with a detectable marker, e.g., a luminescent marker, and the infection of the bacteria is determined by detecting an increase in the marker, e.g., in a luminescence assay.

### REFERENCES

[0106] 1. Abedon, S. T., & Yin, J. (2009). Bacteriophage plaques: theory and analysis. Methods in molecular biology (Clifton, N.J.), 501, 161-74. doi:10.1007/978-1-60327-164-6_17
[0107] 2. Altschul et al., 1997. Gapped BLAST and PSI-BLAST: a new generation of protein database search programs, Nucleic Acids Res. 25:3389-3402.
[0108] 3. Baym et al. (2015. Inexpensive multiplexed library preparation for megabase-sized genomes. PLoS ONE, 10(5), 1-15)
[0109] 4. Y. Chen et al., Dysbiosis of small intestinal microbiota in liver cirrhosis and its association with etiology. Scientific reports 6, 34055 (Sep. 30, 2016).
[0110] 5. Cole et al. 2014. Ribosomal Database Project: data and tools for high throughput rRNA analysis Nucl. Acids Res. 42:D633-D642
[0111] 6. A. Davin-Regli, J. M. Pages, Enterobacter aerogenes and Enterobacter cloacae;

[0112] versatile bacterial pathogens confronting antibiotic treatment. Frontiers in microbiology 6, 392 (2015).
[0113] 7. Diene et al. The rhizome of the multidrug-resistant Enterobacter aerogenes genome reveals how new “killer bugs” are created because of a sympatric lifestyle. Mol Biol Evol. 2013 Feb. 30(2):369-83. PubMed PMID: 23071100.
[0114] 8. D. Gevers et al., The treatment-naive microbiome in new-onset Crohn's disease. Cell host & microbe 15, 382 (Mar. 12, 2014).
[0115] 9. J. H. Grose et al., Understanding the enormous diversity of bacteriophages: the tailed phages that infect the bacterial family Enterobacteriaceae. Virology 0, 421 (November 2014).
[0116] 10. K. E. Holt et al., Genomic analysis of diversity, population structure, virulence, and antimicrobial resistance in Klebsiella pneumoniae, an urgent threat to public health. Proceedings of the National Academy of Sciences of the United States of America 112, E3574 (Jul. 7, 2015).
[0117] 11. Hyman, P., & Abedon, S. T. (2010). Bacteriophage host range and bacterial resistance. Advances in applied microbiology (1st ed., Vol. 70, pp. 217-48). Elsevier Inc. doi:10.1016/S0065-2164(10)70007-1
[0118] 12. Kazutaka Katoh, Daron M. Standley; MAFFT Multiple Sequence Alignment

[0119] Software Version 7: Improvements in Performance and Usability. Mol Biol Evol 2013; 30 (4): 772-780
[0120] 13. Kutter, E. (2009). Phage host range and efficiency of plating. Methods in molecular biology (Clifton, N.J.), 501, 141-9. doi:10.1007/978-1-60327-164-6_14
[0121] 14. C. A. Lozupone et al., Alterations in the gut microbiota associated with HIV-1 infection. Cell host & microbe 14, 329 (Sep. 11, 2013).
[0122] 15. S. Mondot et al., Highlighting new phylogenetic specificities of Crohn's disease microbiota. Inflammatory bowel diseases 17, 185 (January, 2011).
[0123] 16. E. G. Pamer, Resurrecting the intestinal microbiota to combat antibiotic-resistant pathogens. Science 352, 535 (Apr. 29, 2016).
[0124] 17. N. Qin et al., Alterations of the human gut microbiome in liver cirrhosis. Nature 513, 59 (Sep. 4, 2014).
[0125] 18. H. S. Said et al., Dysbiosis of salivary microbiota in inflammatory bowel disease and its association with oral immunological biomarkers. DNA research: an international journal for rapid publication of reports on genes and genomes 21, 15 (February, 2014).
[0126] 19. C. L. Sears, W. S. Garrett, Microbes, microbiota, and colon cancer. Cell host & microbe 15, 317 (Mar. 12, 2014).
[0127] 20. E. S. Snitkin et al., Tracking a hospital outbreak of carbapenem-resistant Klebsiella pneumoniae with whole-genome sequencing. Science translational medicine 4, 148ra116 (Aug. 22, 2012).
[0128] 21. Y. Taur, E. G. Pamer, The intestinal microbiota and susceptibility to infection in immunocompromised patients. Current opinion in infectious diseases 26, 332 (August, 2013).
[0129] 22. Tindall et al. Enterobacter aerogenes Hormaeche and Edwards 1960 (Approved Lists 1980) and Klebsiella mobilis Bascomb et al. 1971 (Approved Lists 1980) share the same nomenclatural type (ATCC 13048) on the Approved Lists and are homotypic synonyms, with consequences for the name Klebsiella mobilis Bascomb et al. 1971 (Approved Lists 1980). Int J Syst Evol Microbiol. 2017 February; 67(2):502-504. PubMed PMID: 27902205.
[0130] 23. I. Vujkovic-Cvijin et al., Dysbiosis of the gut microbiota is associated with HIV disease progression and tryptophan catabolism. Science translational medicine 5, 193ra91 (Jul. 10, 2013).
[0131] 24. Zhou et al. 2011 PHAST: A Fast Phage Search Tool. Nucl. Acids Res. 39 suppl. 2: W347-W352
[0132] 25. U.S. Pat. No. 9,415,079. Composition for inducing proliferation or accumulation of regulatory T cells.

### EXAMPLES

### Example 1: Assessing Pathogenic and Colitogenic Potential of Isolated Klebsiella Pneumoniae 2H7 (“Kp2”) and Enterobacter Aerogenes 11E12 Strains (“Kp3”)

[0133] Klebsiella pneumoniae 2H7 strain

[0134] The candidate pathogenic Klebsiella pneumoniae strain ID 2H7 (“KP2”) was isolated from a human saliva sample. Human saliva samples were collected at the Hospital of University of the Ryukyus using a study protocol as described in Said et al. The source of KP2 strain was saliva sample from a patient with Crohn's Disease [IBD121, 52-year-old Japanese man, IOIBD score 1 (remission-phase), “CD patient #2, CD #2”]. Saliva samples from patients with CD [IBD029, 50-year-old Japanese man, IOIBD score 3 (active-phase), “CD patient #1, CD #1”; IBD121, 52-year-old Japanese man, IOIBD score 1 (remission-phase), “CD patient #2, CD #2”], UC (IBD096, 23-year-old Japanese woman, UC-DAI mild, “UC patient #1, UC #1”; IBD118, 65-year-old Japanese man, UC-DAI moderate, “UC patient #2, UC #2”) and from healthy donors (H11, 22-year-old Japanese woman; H17, 23-year-old Japanese man) were selected as representatives of each group (healthy, CD, and UC) on the basis of the principal coordinate analysis of 16S rRNA sequencing data of saliva microbiota. Saliva samples were suspended in equal volume (w/v) of PBS containing 40% glycerol, snap-frozen in liquid nitrogen, and stored at −80° C. until use. The frozen stocks were thawed and orally inoculated into GF mice (250 μL per head).

[0135] Saliva samples from the patients with Crohn's disease were first transplanted into C57BL/6 (B6) germ-free (GF) mice by gavage. The mice were purchased from Sankyo Laboratories Japan and maintained under GF conditions. Each group of mice was housed in separate gnotobiotic isolators for 3 weeks, at which time small intestinal and colonic lamina propria (LP) immune cells were examined.

[0136] To isolate LP lymphocytes, small and large intestines were collected and opened longitudinally, washed with phosphate buffered saline pH 7.4 (PBS) to remove all luminal contents, and shaken in Hanks' balanced salt solution (HBSS) containing 5 mM ethylenediaminetetraacetic acid (EDTA) for 20 mM at 37° C. After epithelial cells and muscle layers were removed using forceps, the LP layers were cut into small pieces and incubated with RPMI1640 containing 4% fetal bovine serum, 0.5 mg/mL collagenase D, 0.5 mg/mL dispase, and 40 μg/mL DNase I for 1 h at 37° C. in a shaking water bath. The digested tissues were washed with HBSS containing 5 mM EDTA, resuspended in 5 mL of 40% Percoll, and overlaid on 2.5 mL of 80% Percoll in a 15-mL Falcon tube. Percoll gradient separation was performed by centrifugation at 800×g for 20 mM at 25° C. Lymphocytes were collected from the interface of the Percoll gradient and suspended in ice-cold PBS and stimulated with 50 ng/mL phorbol myristate acetate (PMA) and 750 ng/mL ionomycin in the presence of Golgistop at 37° C. for 4 h. After dead cells were labeled using the LIVE/DEAD fixable stain kit, the cells were permeabilized and stained with anti-CD3, CD4, TCRβ, IL-17A, IFN-γ, T-Bet, and RORγt using the Foxp3 staining buffer set. All data were collected on a BD LSRFortessa or FACSAria III and analyzed with Flowjo software. CD4⁺ T cells were defined as a CD4⁺TCRβ⁺ subset within the live lymphocyte gate.

[0137] In mice receiving a saliva sample from CD patient #1 (GF+CD #1 mice), there were no significant changes in the intestinal immune cell characteristics. In contrast, in the group that received a saliva sample from CD patient #2 (GF+CD #2 mice), there was a marked accumulation of interferon-γ (IFN-γ)+CD4+ T cells (TH1 cells) in the intestinal LP. (FIG. 1A). The community composition of the saliva microbiota before administration into GF mice and consequent fecal microbiota of the colonized animals (ex-GF mice) were compared by 16S rRNA gene sequencing. To this end, the cecal contents from mice were suspended in 10 mL of Tris-EDTA buffer containing 10 mM Tris-HCl (pH 8.0) and 10 mM EDTA containing 100 μg/mL RNase A, and lysozyme was added to a final concentration of 15 mg/mL. The suspension was incubated for 1 h at 37° C. with gentle mixing. Purified achromopeptidase was added to a final concentration of 2,000 unit/mL, and the sample was further incubated for 30 mM at 37° C. Then, sodium dodecyl sulfate (final concentration, 1%) was added to the suspension and mixed well. Subsequently, proteinase K was added (final concentration, 1 mg/mL) to the suspension, and the mixture was incubated for 1 h at 55° C. High-molecular mass DNA was extracted by phenol:chloroform:isoamyl alcohol (25:24:1), precipitated by polyethylene glycol 8000 (PEG 8000), washed with 70% ethanol, and resuspended in TE. PCR was performed using Ex Taq and (1) the 454 primer A (5′-CCATCTCATCCCTGCGTGTCTCCGACTCAG (454 adaptor sequence)+barcode (10 bases)+AGRGTTTGATYMTGGCTCAG-3′ (27Fmod)) and (2) the 454 primer B (5′-CCTATCCCCTGTGTGCCTTGGCAGTCTCAG (454 adaptor sequence)+TGCTGCCTCCCGTAGGAGT-3′ (338R)) to the V1-V2 region of the 16S rRNA gene. Amplicons generated from each sample (˜330 bp) were subsequently purified using AMPure XP. DNA was quantified using a Quant-iT Picogreen dsDNA assay kit and a TBS-380 Mini-Fluorometer. Then, the amplified DNA was used as template for 454 GS Junior pyrosequencing using GS Junior Titanium emPCR Kit-Lib-L, GS Junior Titanium Sequencing Kit, and GS Junior Titanium PicoTiterPlate Kit according to the manufacturer's instructions. Quality filter-passed reads were obtained by removing reads that did not have both primer sequences, had an average quality value of <25, and were possibly chimeric. Of the filter-passed reads, 3,000 reads were used after trimming off both primer sequences for each sample and subjected to OTU analysis with the cutoff similarity of 96% identity. Representative sequences from each OTU were blasted to databases from the RDP and reference genome database constructed from publicly available genome sequences in NCBI and Human Microbiome Project databases.

[0138] Although the saliva samples of both patients had similar microbial communities, the fecal microbiota compositions differed markedly between GF+CD #2 mice and GF+CD #1 mice. Most of the bacterial species observed in the fecal microbiota of ex-GF mice were found to be minor components of the salivary microbiota, suggesting that bacterial species that constitute a small fraction of the oral microbiota can colonize in the gut, and a further limited subset can induce the accumulation of intestinal TH1 cells.

[0139] To isolate TH1-cell-inducing bacteria in CD #2 sample, cecal content from GF+CD #2 mice was serially diluted with PBS and seeded onto nonselective agar plates (Schaedler, BHI, GAM, CM0151, BL, and TS). After culture under anaerobic conditions (80% N₂, 10% H₂, 10% CO₂) in an anaerobic chamber at 37° C. for 2 or 4 days, individual colonies were picked, and DNA was extracted and subjected to sequencing of the 16S rRNA gene fragment. 224 colonies were picked for GF+CD #2 mice from the culture media with different colony appearances. Individual isolates in the culture collection were grouped into “strains” if they shared the 16S rRNA gene sequence with >96% identity. The resulting strain sequences were compared to those in the Ribosomal Database Project (RDP) database and to OTUs observed in cecal samples to determine closely related species or strains and corresponding OTUs.

[0140] Sequencing of the 16S rRNA gene revealed that these colonies comprised eight strains, including Gemella, Bifidobacterium, Streptococcus, Escherichia, Fusobacterium, Veillonella, Anaerococcus, and Klebsiella. The eight strains were cultured and introduced as a mixture (8-mix) into GF mice. To prepare the bacterial mixture, bacterial strains were individually grown in EG broth to confluence and mixed at equal volumes of medium. The mixture of isolates was orally administered to GF mice (approximately 1×10⁸ CFU of total bacteria in 150 μL medium per head). All mice receiving a given mixture of bacterial strains were maintained in a single gnotobiotic isolator. K. pneumoniae strains were grown at 37° C. in Luria-Bertani (LB) broth or on LB agar plates.

[0141] In mice inoculated with 8-mix, efficient induction of TH1 cells was observed in the colonic LP, with a magnitude comparable to that observed in GF+CD #2 mice. Because Fusobacterium (Fu) and Veillonella (Ve) have been implicated in IBD pathogenesis (Gevers et al., 2014), mice were colonized with two strains (strain ID Fu-21f and Ve-2E1). Unexpectedly, however, colonization with Fu-21f and Ve-2E1 strains resulted in only marginal elevation of TH1-cell frequency. Whereas, surprisingly, oral administration with Klebsiella pneumoniae strain ID 2H7 (“KP2”) alone induced TH1 cells, while a mixture of the remaining seven strains (7-mix) failed to do so, suggesting that the KP2 strain was the major contributor to the accumulation of TH1 cells observed in GF+CD #2 mice. (FIG. 1B).

[0142] The colitogenic potential of KP2 was examined KP2 did not induce any inflammatory changes in the intestine of wild-type (WT) hosts, either monocolonized in B6 GF mice or colonized in Amp-treated B6 SPF mice, despite inducing TH1 cells. Since the interplay between microbial and genetic factors contributes substantially to the pathogenesis of IBD, the influence of KP2 colonization in Il10−/− B6 mice (Jackson Laboratories), which are genetically prone to colitis, was examined GF Il10−/− mice or Amp-treated SPF Il10−/− mice were orally administered KP2 or Escherichia coli strain ID 2B1 (Ec-2B1), which was also isolated from GF+CD #2 mice but had a weak ability to induce TH1 cells. Both K. pneumoniae and E. coli belong to Enterobacteriaceae, a family that has been implicated in IBD pathogenesis (Gevers et al., 2014). Histological analysis showed that KP2 induced more severe inflammation than Ec-2B1 in the proximal colon of ex-GF or Amp-treated SPF Il10−/− mice, suggesting that KP2 acts as a gut pathobiont by inducing the TH1 cell response. (FIG. 1C). KP2 may also induce additional pro-inflammatory effects in a species-specific and host genotype-specific fashion.

[0143] Enterobacter aerogenes 11E12 strain

[0144] The candidate pathogenic Enterobacter aerogenes strain ID 11E12 (“KP3”) was isolated from human saliva samples. Human saliva samples were collected at the Hospital of University of the Ryukyus using a study protocol as described in Said et al. The source of KP3 strain was the saliva of a patient with Ulcerative Colitis [IBD118, 65-year-old Japanese man, UC-DAI moderate, “UC patient 2, UC #2”]. Tested saliva samples were suspended in equal volume (w/v) of PBS containing 40% glycerol, snap-frozen in liquid nitrogen, and stored at −80° C. until use. The frozen stocks were thawed and orally inoculated into GF mice (250 μL per head) as described for KP2.

[0145] Saliva samples from the two patients with active ulcerative colitis (UC patient #1 and UC patient #2) were administered to GF WT B6 mice and analyzed as described for Klebsiella pneumoniae KP2 strain. Marked accumulation of TH1 cells was observed in the colonic LP of mice inoculated with a saliva sample from UC patient #2 (GF+UC #2 mice), and the level was comparable to that observed in GF+CD #2 mice. (FIG. 2A).

[0146] To isolate strains responsible for the observed TH1 cell induction in the UC #2 sample, cecal content was collected from GF+UC #2 mice and cultured in vitro as described for culturing of CD #2 sample. 13 strains were isolated and roughly represented the microbiota configuration of GF+UC #2 mice. The oral administration of a mixture of 13 strains (13-mix) in GF mice replicated the phenotype observed in GF+UC #2 mice in terms of colonic TH1-cell induction. Among 13 strains, Enterococcus faecium strain ID 11A1 (Ef-11A1) and Klebsiella aeromobilis 11E12 (“KP3”) had been reported to be important multidrug-resistant pathobionts and implicated in IBD pathogenesis (Taur et al., 2013; Davin-Regli et al., 2015; Mondot et al., 2011; Diene et al., 2013). GF mice were gavaged with either Ef-11A1, KP3, or a mixture of the 11 other strains (11-mix). KP3 induced a marked accumulation of TH1 cells in the colon at a level comparable to that observed in GF+13-mix and GF+UC #2 mice, whereas Ef-11A1 or 11-mix failed to do so. Therefore, KP3 was likely associated with the induction of TH1 cells, although KP3 was a minor member of the gut microbiota in GF+UC #2 mice. (FIG. 2B).

[0147] Next, the colitogenic potential of the isolated KP3 strain was assessed in Il10^{-/-} mice as described for KP2. KP3 colonization resulted in inflammation in Il10^{-/-} mice, suggesting that the oral-derived K. aeromobilis strain, may also act as a pathobiont in the intestine. (FIG. 2C).

### Example 2: Sample Sourcing and Processing for Bacteriophage

[0148] Sewage was obtained from the National Virology Center at Sheba Hospital. Dental sewage was collected from the dental clinic at Poria Hospital. Fecal samples were provided from healthy donors at Ichilov Hospital.

[0149] Batches of sewage comprised of 5-6 samples obtained from different places at different times were centrifuged and the supernatant was filtered (Merck Millipore glass fiber prefilters APFD, APFB followed by Express plus PES 47 mm disks 0.45 μm filters) using a vacuum filtration system. During this process 400 mL of 5-6 samples were mixed into one pool. The pooled sewage sample mix was concentrated by the Pellicon filter system (from 2 L to 20 mL). Concentrated sewage sample is filtered with 0.45 μM filter, passed to barcoded tube and stored at 4° C. Thus, each sewage phage isolate in the bank is comprised of phage from 5-6 samples of different geographical origins.

[0150] Dental sewage samples of 4-5 different donors were processed in a similar way to regular sewage, except that the starting volume of batches was <400 mL. Concentrated dental sewage sample is filtered with 0.45u filter, passed to barcoded tube and stored at 4° C.

[0151] Fecal samples were processed individually as follows: 5 g of each fecal sample of an individual donor was weighed and inserted into a BagMixer plastic bag together with SM buffer (50 mM Tris, 200 mM NaCl, 10 mM MgSO4, 0.01% Gelatin). The fecal matter was re-suspended by 2 cycles of 2 minutes in a BagMixer 400P stomacher. The resulting suspension was centrifuged and the remaining supernatant was filtered by 0.45 μm filter to remove the bacterial fraction and kept at 4° C.

### Example 3: Screening Environmental and Clinical Samples for Phage that Recognize K. Pneumoniae Clinical Strains

[0152] KP2 and KP3 were isolated and sequenced as described herein to produce reference genomes. Subsequent alignments were performed with Illumina reads using bowtie2 to the reference genome. Overall alignments of >98% confirmed that subsequent strains were pure. An in-silico 16S PCR was run on the KP2 and KP3 genomes resulting in amplicons that both NCBI BLAST (Altschul et al. 1997) and the Ribosomal Database Project (Cole et al. 2014) matched to the 16S of Klebsiella pneumoniae and Enterobacter aerogenes respectively. The assignment of KP3 to Enterobacter aerogenes was further confirmed by colony mass spectrometry.

[0153] 10 dental sewage samples, 41 sewage samples and 70 fecal samples were used to assemble mini-mixes or 3-sample mixes (total 39 mixes). Screening was performed by testing 10 μL of each mix on both KP2 and KP3 bacterial lawns, in 48 well plates by drop plaque assay (Bacteriophages methods and protocols MRJ Clokie AM Kropinsky). Plates were incubated for 2-3 hrs (37° C.) in aerobic conditions, after which plaques became visible on the bacterial lawns. By this procedure plaques were detected in 1/39 wells on KP2, and plaques in 11/39 wells on KP3 as shown in Table 2. Plaques observed on KP3 were isolated as follows: from 5/11 wells one plaque each was picked, from 4/11 wells two different plaques were picked by morphology, from 2/11 wells three different plaques were picked by morphology. A single plaque was isolated for KP2. Plaques were picked up (using a sterile 20 μL tip) into phage buffer (Tris-HCL pH 7.5 50 mM, NaCl 100 mM, MgCl₂*6H₂O 5 mM, MnCl₂*4H₂O 0.1 mM in DDW) and re-isolated for a total of 3 rounds (See table 2).

TABLE 2
KP2 and KP3 phage obtained from environmental samples.

| | | | Sample no. |
|---|---|---|---|
| | | | (each sample is a |
| Phage name | Host | Mix no. | mixture of 5) |
| KP2W-P0106 | KP2 | 5 | 1-3 |
| KP3W-P0109 | KP3 | 5 | 1-3 |
| KP3W-P0201 | KP3 | 6 | 4-6 |
| KP3W-S0101 | | | |
| KP3W-P0202 | KP3 | 7 | 7-9 |
| KP3W-P0103 | | | |
| KP3W-P0112 | KP3 | 8 | 10-12 |
| KP3W-P0105 | KP3 | 11 | 19-21 |
| KP3W-P0102 | | | |
| KP3W-P0101 | KP3 | 12 | 22-24 |
| KP3W-P0108 | KP3 | 13 | 25-27 |
| KP3W-P0110 | KP3 | 15 | 31-34 |
| KP3W-P0113 | | | |
| KP3W-P0114 | | | |
| KP3W-P0106 | KP3 | 16 | 35-37 |
| KP3W-P0203 | | | |
| KP3W-S0102 | | | |
| KP3W-P0104 | KP3 | 17 | 38-40 |
| KP3W-P0107 | | | |
| KP3W-P0111 | KP3 | 18 | 41 |

[0154] To enlarge the pool of phage that recognize KP2, the environmental and clinical samples were enriched for the desired phage as follows: 10 dental sewage samples, 41 sewage samples and 70 fecal samples were used to assemble 6-sample mixes (total 21 mixes). Enrichments were performed by culturing KP2 in 21×4 mL culture tubes plus 100 μL of each mix, and incubating for 3 hrs at 37° C. During this period any phage that infects the KP2 would be amplified to enable easier detection by plaque assay. The KP2 phage found via enrichments may be amplified wild-type phage that were present in the original samples or phage that have acquired specific mutations allowing more efficient infections during the directed enrichment process.

[0155] Following the incubation, the tubes were centrifuged, supernatant was filtered by 0.45 μm syringe filter and tubes were kept at 4° C. Screening of the enriched environmental samples was performed by testing 10 μL of each on KP2 bacterial lawns, in 48 well plates by drop plaque assay. Plate was incubated for 2-3 hrs at 37° C., at aerobic conditions, after which plaques became visible on the bacterial lawn. By this procedure plaques were detected in 4/21 enrichments as shown in Table 3. From 3/21 wells one plaque each was picked, and from 1/21 wells two different plaques were picked by morphology. Plaques were picked up (using a sterile 20 μL tip) into phage buffer and re-isolated for a total of 3 rounds.

TABLE 3
Additional KP2 phage obtained by enrichments of environmental
and clinical samples. SWG—sewage, fecal—fecal
clinical samples obtained from healthy of IBD donors.

| Name | Host | Enrichment source |
|---|---|---|
| KP2W-M0104 | KP2 | SWG(4-6) + fecal(13-15) |
| KP2W-P0101 | KP2 | SWG(31-34) + fecal (41-44) |
| KP2W-P0102 | KP2 | SWG(35-37) + fecal (45-47) |
| KP2W-P0103 | KP2 | SWG(35-37) + fecal (45-47) |
| KP2W-P0104 | KP2 | SWG(38-40) + fecal (48-50) |

### Example 4: Phage Amplification and Determination of Phage Titers

[0156] Out of the 25 phages (6 phage isolated on KP2 plus 19 phage isolated on KP3), part were amplified from liquid broth whereas the rest were amplified from soft agar by double agar overlay plaque assay. Amplification from liquid broth was performed by diluting 50 μL of isolated phage sample into 4 mL log phase culture at OD=1.7, or into 4 mL log phase culture at OD=0.5, and incubating at 37° C., overnight. Tubes were centrifuged, the supernatant was filtered by 0.45 μm syringe filter, and 1 mM of the divalent ions Ca²⁺ and Mg²⁺ were added.

[0157] Phage titers were determined by drop plaque assay as follows: host culture was prepared by inoculating 4 mL liquid BHIS (BACTO™ Brain Heart Infusion BHI, Yeast extract 0.5% and Resazurin) with 5-10 colonies of the host and incubating at 37° C., until OD was 1.7 (1.5-2 hrs). 100 μL of host culture were added to 4 mL of molten top agar (BHIS top agar: BHIS media, 0.4% Agarose) with divalent ions Ca²⁺ Mg²⁺ and dispensed (100 μL/well) to 48 well plate with underlay of bottom agar (BHIS bottom agar: BHIS media, 1.6% Agarose). Plate was incubated for 30 minutes (37° C.), and then serial dilutions of phage sample were dropped (10 μL). Plate was incubated for 2-3 hrs before counting plaques (10-50 plaques) and determination of phage titer (number of plaques×10×reciprocal of counted dilution=PFU/mL).

[0158] Amplification of phage from soft agar was performed in cases where titers of phage that were produced from liquid BHIS were lower than 1×10⁹ PFU/mL. Host culture at OD=1.7, was diluted to OD=1, and aliquots of 100 μL diluted host culture were added to 100 μL of phage at a titer that is sufficient to result in production of confluent plaques, and incubated at room temperature for 15 minutes. Then each host-phage mixture was diluted with 3 mL soft molten agar, and poured on top of BHIS bottom agar. Plates were let to harden, and then incubated at 37° C. for 2-3 hrs or until complete lysis. Plates were scraped from the top agar with a spreader and agar was transferred to sterile tubes with BHIS and 10 μL of chloroform. Tubes were allowed to stand for 30 minutes, to allow phages to elute from the soft agar. Tubes were centrifuged, and supernatant was filtered with 0.45 μM syringe filter to eliminate residual agar. Divalent ions Ca²⁺ Mg²⁺ at concentration of 1 mM were added to tubes which were stored at 4° C.

### Example 5: Host Range Analysis of Isolated Phage

[0159] Host range analysis for phage isolated on KP2 and KP3 strains, as well as for the commercial phage (ATCC 23356-B1) was performed on six K. pneumoniae strains from ATCC: BAA-2552 (KP1), 23356 (KP4), 13882 (KP5), BAA-1705 (KP6), 700603 (KP7), 700721 (KP8). Each phage was added (10 μL) to bacterial lawns of K. pneumoniae strains, in 48 well plates by drop assay. Plates were incubated for 2-3 hrs (37° C.) in aerobic conditions, after which plaques become visible on the bacterial lawns. Plates with bacterial lawns of KP2 and KP3 and their respective phage served as positive control. Host range was done for each of the phage with two phage titers; 1×10⁶ PFU/mL and 1×10⁹ PFU/mL. As can be seen in FIG. 3, where dark gray indicates susceptibility and gray indicates resistance, all phage exhibited high specificity for their hosts. This was the case for both titers tested. The exception to this observation was for phage KP2W-M0104 which infected 23356 strain at titer of 1×10⁹ PFU/mL, however no plaques were observed for KP2W-M0104 on 23356 at a lower titer of 1×10⁶ PFU/mL. Thus, phage isolated on KP2 and KP3 are each specific for their hosts, meaning that they recognize specific receptors/attachment sites expressed exclusively by these bacterial strains (KP2, KP3). Moreover, the commercial phage ATCC 23356-B1 did not recognize neither KP2 nor KP3, but only the strain KP4 on which it was isolated, suggesting that the newly isolated phage have a novel function.

### Example 6: Growth Curves of Kp2, Kp3, and Mutant

[0160] The growth curves of KP2 and KP3 strains were generated by monitoring OD at 600 nm using a plate reader for strains cultured alone, in the presence of individual phage, or in the presence of a cocktail of all the phages available against each bacterial strain. Briefly, KP2 and KP3 strains were cultured in 4 mL liquid BHIS to OD600=1.7. Then, cultures were diluted to OD600=0.2 and dispensed (0.2 mL/well) into a 96 well plate. Each bacterial strain was tested in duplicate with respective individual phages (KP2 phages (n=6) and KP3 phages (n=19), or in the presence of a phage cocktail containing all respective phages in equal ratios and in a total number equivalent to that of individual phage alongside the phage-free controls. Phage titers were 1×10⁶ PFU/mL at a volume of 10 μL/well of phage or phage cocktail. Wells were filled with Mineral oil (50 μL/well) and the plate was sealed with an optical seal to avoid evaporation of sample during incubation. Plate was inserted to the robot plate reader (Freedom EVO 75, Tecan), plate was incubated (37° C.) and read every 15 minutes for 22 hrs at OD=600 nm. Analysis of the results for KP2 strain are presented in FIG. 4. KP2 growth curve without phage is illustrated by the black line, while the remaining lines present the growth curves of KP2 with a single phage as indicated. The dashed line represents KP2 growth curve in the presence of the cocktail of six phages. The KP2 growth curves generated in the presence of individual phages demonstrate the regrowth of resistant or appearance of mutant strains after 1-2 hrs. In contrast, the growth of KP2 in the presence of the cocktail displays appearance of resistant mutants after 9 hrs enabling significant improvement in a “time to mutant” parameter. Similar analysis performed for KP3 strain resulted in tripled “time to mutant” or even no appearance of mutants during the course of the study.

### Example 7: Creating Kp2 Mutants for the Screening of Additional Phage

[0161] During the infection of the bacteria by a phage, mutant bacterial strains arise that are resistant to the phage. To target the resistant mutant strains the following strategy was employed: first, the mutant KP2 strains arising as a result of the incubation with the cocktail of the following phage KP2W-P0101, KP2W-P0102, KP2W-P0103, KP2W-P0104 and KP2W-M0104 (phage titers of 1×10⁶ PFU/mL) as well as the mutants arising against KP2W-P0104 phage were collected and characterized. To this end, KP2 strain was cultured in 4 mL BHIS, at 37° C. with shaking to OD₆₀₀ₙₘ=1.5. Then, culture was diluted with liquid BHIS to OD=0.2 and dispensed (200 μL/well) into 96 wells plate. A volume of 10 μE of KP2W-P0104 phage was added to create MKP2_2161_1 mutant and 10 μE of a cocktail of the phage described above (at equal amounts) were added to create MKP2_coc_1 mutant. Each well was covered with mineral oil (50 μL/well) and sealed with a tape to avoid evaporation of sample. Absorbance (600 nm) was monitored in plate reader every 15 min for 24 hrs. Analysis of the growth curves of KP2 alone, or KP2 infected with KP2W-P0104, or with all six phage, revealed mutant candidates. The contents of the wells containing mutant candidate were plated on BHIS agar plates and incubated overnight at 37° C. Next, single colonies were isolated and propagated in liquid BHIS. The candidates were verified as Klebsiella pneumoniae by 16S pyrosequencing followed by confirmation of resistance to the respective phages by drop assay and whole genome sequencing. MKP2_2161_1 was found to be resistant to all phage isolates but KP2W-M0104, and MKP2_coc_1 was found to be resistant to all phages tested. The two mutants MKP2_2161_1 and MKP2_Coc_1 were used in phage selections to further expand our phage pool.

### Example 8: Enrichments with MKP2_2161_1 and MKP2_coc_1

[0162] To isolate phages capable of infecting the resistant KP2 mutants, MKP2_2161_1 and MKP2_coc_1, the following environmental and clinical samples were enriched on MKP2_2161_1 and MKP2_coc_1: 19 dental sewage, 58 sewage and 100 fecal samples were used to assemble 7-9 sample mixes (total 19 mixes). Enrichments were performed by culturing each of the mutants (MKP2_2161_1 and MKP2_Coc_1) with each of the 19 mixes in 19×4 mL culture tubes plus 150 μL of each mix, for 3 hrs at 37° C. Following the incubation, the tubes were centrifuged, supernatants were filtered by 0.45 μm syringe filter and kept at 4° C. Screening of the enriched samples was performed by testing 10 μL of each enriched sample on KP2, MKP2_2161_1 and MKP2_Coc_1 bacterial lawns, in 48 well plates by drop plaque assay. Plates were incubated for 2-3 hrs at 37° C., at aerobic conditions, after which plaques became visible on bacterial lawn. This procedure yielded plaques in 8/19 enrichments as shown in the Table 4. Enrichments on MKP2_2161_1 tested on MKP2_2161_1 lawn resulted in 9 phage and enrichments on tested on MKP2_Coc_1 resulted in 17 phage from 8 different sources. Enrichments on MKP2_Coc_1 were tested for infectivity on MKP2_2161_1 and MKP2_Coc_1 lawns and yielded 10 plaques from 8 different sources. Enrichments on MKP2_2161_1 tested on KP2 lawn and enrichments on MKP2_Coc_1 tested on KP2 lawn, resulted in 10 plaques from 6 different sources (Table 4). Plaques were picked up using a sterile 20 μL tip into phage buffer and re-isolated for a total of 3 rounds.

TABLE 4
Phage against KP mutants obtained from enrichments of phage isolates.
Enrichments/re-isolation (either one or two rounds, or no (0)) on MKP2_2161_1
resulted in 9 phage and enrichments/re-isolation (ranging from one to three
rounds, or no (0)) on MKP2_Coc_1 resulted in 17 phage from 8 different sources.
Enrichment were tested on MKP2_2161_1, MKP2_Coc_1 and on KP2 lawns.
SWG—sewage, DSWG—dental sewage, fecal—fecal clinical samples
obtained from either healthy or IBD donors.

| | | Source and | | | |
|---|---|---|---|---|---|
| | | sample no. | | MKP2_2161_1 | MKP2_coc_1 |
| | Mini | (each sample is | | enrichment | enrichment |
| Phage name | mix no | a mixture of 5) | | rounds | rounds |
| KP2W-M0102 | 3 | 19 | (DSWG) | 1 | 2 |
| KP2M-M0109 | | 1-6 | (SWG) | | |
| KP2M-P0204 | | | | | |
| KP2W-M0103 | 4 | 7-15 | (SWG) | 2 | 2 |
| KP2M-M0105 | | | | | |
| KP2W-P0202 | | | | | |
| KP2M-P0207 | | | | | |
| KP2M-M0110 | 5 | 16-24 | (SWG) | 1 | 2 |
| KP2M-P0203 | | | | | |
| KP2W-M0106 | | | | | |
| KP2M-M0111 | 6 | 25-34 | (SWG) | 0 | 2 |
| KP2M-P0206 | | | | | |
| KP2W-P0109 | 7 | 35-42 | (SWG) | 1 | 3 |
| KP2W-P0107 | | | | | |
| KP2M-M0112 | | | | | |
| KP2W-P0105 | 8 | 44-52 | (SWG) | 2 | 2 |
| KP2W-P0108 | | | | | |
| KP2M-P0201 | | | | | |
| KP2M-P0212 | | | | | |
| KP2M-P0208 | 9 | 53-58 | (SWG) | 2 | 3 |
| KP2M-P0209 | | | | | |
| KP2M-P0210 | | | | | |
| KP2W-M0107 | | 1-3 | (Fecal) | | |
| KP2M-M0108 | | | | | |
| KP2M-P0211 | 15 | 51-56 | (Fecal) | 0 | 1 |

### Example 9: Host Range Analysis of Newly Isolated Phages

[0163] Host range analysis for phage isolated on MKP2_2161_1, MKP2_Coc_1 and on KP2 strains, was performed on four additional KP mutants; MKP2_2161_C (produced against KP2W-P0104), MKP2_251_B, MKP2_251_C and MKP2_251_D (produced against KP2W-M0104) and on KP4 strain. Each of the phage were added (10 μL) to bacterial lawns of the different K. pneumoniae strains, in 48 well plates by drop assay. Plates were incubated for 2-3 hrs (37° C.) in aerobic conditions, after which plaques become visible on the bacterial lawns. Plates with bacterial lawns of MKP2_2161_1, MKP2_Coc_1 and KP2 and their respective phage served as positive control. Host range was done for each of the phage with two phage titers; 1×10⁶ PFU/mL and 1×10⁹ PFU/mL. Table 5, Table 6, and Table 7 show phage that were isolated on MKP2_2161_1 and MKP2_Coc_1 did not infect KP2. However, phage that were isolated on KP2 infected part or all KP2 mutant strains as well as the commercial strain KP4.

TABLE 5
Characterization of isolated phage.

| | | Size | GC | # | VIRFAM | Most |
|---|---|---|---|---|---|---|
| | Isolated on | (Kb) | % | genes | analysis | similar to |
| KP3W-P0101 | KP3 | 40.2 | 52.74% | 50 | Podoviridae | phiYeO3-12/ |
| KP3W-P0102 | KP3 | 40.6 | 52.93% | 48 | of Type3 | T3/T7 |
| KP3W-P0103 | KP3 | 40.7 | 52.93% | 48 | | |
| KP3W-P0104 | KP3 | 41.4 | 52.83% | 49 | | |
| KP3W-P0105 | KP3 | 40.3 | 52.98% | 47 | | |
| KP3W-P0106 | KP3 | 40.7 | 52.45% | 49 | | |
| KP3W-P0107 | KP3 | 41.3 | 52.32% | 52 | | |
| KP3W-P0108 | KP3 | 41 | 52.41% | 53 | | |
| KP3W-P0109 | KP3 | 41.1 | 52.39% | 53 | | |
| KP3W-P0110 | KP3 | 41.2 | 52.59% | 52 | | |
| KP3W-P0111 | KP3 | 40.8 | 52.44% | 51 | | |
| KP3W-P0112 | KP3 | 40.7 | 52.42% | 50 | | |
| KP3W-P0113 | KP3 | 40.7 | 52.46% | 50 | | |
| KP3W-P0114 | KP3 | 40.4 | 52.34% | 47 | | |
| KP3W-P0201 | KP3 | 40.6 | 51.64% | 49 | | |
| KP3W-P0202 | KP3 | 40.4 | 51.69% | 50 | | |
| KP3W-P0203 | KP3 | 40.6 | 51.58% | 48 | | |
| KP3W-S0101 | KP3 | 51.7 | 51.71% | 81 | Siphoviridae | T1/TL5/RTP |
| KP3W-S0102 | KP3 | 50.4 | 51.31% | 73 | of Type1 | |
| KP2W-P0101 | KP2 | 40.3 | 50.16% | 51 | Podoviridae | phiYeO3-12/ |
| KP2W-P0102 | KP2 | 40.4 | 50.16% | 51 | of Type3 | T3/T7 |
| KP2W-P0103 | KP2 | 40.4 | 50.16% | 51 | | |
| KP2W-P0104 | KP2 | 38.2 | 50.92% | 45 | | |
| KP2W-P0105 | KP2 | 39.1 | 50.79% | 46 | | |
| KP2W P0106 | KP2 | 39.4 | 50.73% | 48 | | |
| KP2W-P0107 | KP2 | 39 | 50.67% | 47 | | |
| KP2W-P0108 | KP2 | 39 | 50.66% | 47 | | |
| KP2W-P0109 | KP2 | 39 | 50.69% | 47 | | |
| KP2M-P0201 | KP3-Coc-M | 44.2 | 54.28% | 53 | | |
| KP2W-P0202 | KP2 | 43.8 | 54.13% | 56 | | |
| KP2M-P0203 | KP2-Coc-M | 43.8 | 54.15% | 54 | | |
| KP2M-P0204 | KP2-Coc-M | 43.5 | 54.19% | 53 | | |
| KP2M-P0205 | KP2-Coc-M | 43.8 | 54.10% | 54 | | |
| KP2M-P0206 | KP2-Coc-M | 44.8 | 53.96% | 56 | | |
| KP2M-P0207 | KP2-Coc-M | 43.2 | 54.21% | 53 | | |
| KP2M-P0208 | MKP2_2161_ 1 | 44.8 | 54.14% | 55 | | |
| KP2M-P0209 | KP2-Coc-M | 44.8 | 54.12% | 56 | | |
| KP2M-P0210 | KP2-Coc-M | 44.8 | 54.14% | 57 | | |
| KP2M-P0211 | KP2-Coc-M | 43.6 | 54.16% | 54 | | |
| KP2M-P0212 | KP2-Coc-M | 43.6 | 54.13% | 55 | | |
| KP2W-M0102 | KP2 | 178.1 | 44.89% | 274 | Myoviridae | RB43/T4 |
| KP2W-M0103 | KP2 | 179.7 | 44.90% | 280 | of Type2 | |
| KP2W-M0104 | KP2 | 178.4 | 44.92% | 273 | | |
| KP2M-M0105 | MKP2_2161_1 | 178.9 | 44.90% | 276 | | |
| KP2W-M0106 | KP2 | 179 | 44.67% | 273 | | |
| KP2W-M0107 | KP2 | 178.1 | 44.84% | 270 | | |
| KP2M-M0108 | MKP2_2161_1 | 177.8 | 44.85% | 267 | | |
| KP2M-M0109 | MKP2_2161_1 | 178.6 | 44.76% | 270 | | |
| KP2M-M0110 | MKP2_2161_1 | 177.5 | 44.78% | 267 | | |
| KP2M-M0111 | MKP2_2161_1 | 178.8 | 44.72% | 275 | | |
| KP2M-M0112 | MKP2_2161_1 | 179.5 | 44.54% | 267 | | |

TABLE 6
Host range analysis of phage isolated against MKP2_2161_1, MKP2_coc_1 and KP2,
including activity against other KP2 mutants and Klebsiella strain KP4. Phage titers
were 1 × 109 PFU/mL. R—resistant to the infection with the tested phage,
S—sensitive to the infection with the tested phage, NT—not tested
Infectivity at 1 × 10⁹ PFU/mL

| Phage | | | | | | | | | |
|---|---|---|---|---|---|---|---|---|---|
| name | Isolated on | KP2 | MKP2_2161_1 | MKP2_2161_C | MKP2_251_B | MKP2_251_C | MKP2_251_D | MKP2_coc_1 | KP4 |
| KP2M- | MKP2_2161_1 | R | S | S | R | R | R | R | NT |
| M0109 | | | | | | | | | |
| KP2M- | | S | S | S | R | R | R | R | NT |
| M0105 | | | | | | | | | |
| KP2M- | | R | S | S | R | R | R | R | NT |
| M0110 | | | | | | | | | |
| KP2M- | | S | S | S | R | S | S | S | NT |
| M0111 | | | | | | | | | |
| KP2M- | | S | S | S | R | R | R | R | NT |
| M0112 | | | | | | | | | |
| KP2M- | | S | S | S | R | R | R | R | NT |
| M0108 | | | | | | | | | |
| KP2M- | | R | S | S | R | S | S | S | NT |
| P0208 | | | | | | | | | |
| KP2M- | MKP2_coc_1 | R | S | S | R | S | S | S | NT |
| P0204 | | | | | | | | | |
| KP2M- | | R | S | S | R | S | S | S | NT |
| P0207 | | | | | | | | | |
| KP2M- | | R | S | S | R | S | S | S | NT |
| P0203 | | | | | | | | | |
| KP2M- | | R | S | S | R | S | S | S | NT |
| P0206 | | | | | | | | | |
| KP2M- | | R | S | S | R | S | S | S | NT |
| P0205 | | | | | | | | | |
| KP2M- | | R | S | S | R | S | S | S | NT |
| P0212 | | | | | | | | | |
| KP2M- | | R | R | R | R | S | S | S | NT |
| P0201 | | | | | | | | | |
| KP2M- | | R | S | S | R | S | S | S | NT |
| P0209 | | | | | | | | | |
| KP2M- | | R | S | R | R | R | S | R | NT |
| P0210 | | | | | | | | | |
| KP2M- | | R | S | S | R | S | S | S | NT |
| P0211 | | | | | | | | | |
| KP2W- | KP2 | S | S | S | S | S | S | S | NT |
| M0102 | | | | | | | | | |
| KP2W- | | S | S | S | R | R | R | R | NT |
| M0103 | | | | | | | | | |
| KP2W- | | S | S | S | S | S | S | S | S |
| P0202 | | | | | | | | | |
| KP2W- | | S | S | S | R | R | R | R | S |
| M0106 | | | | | | | | | |
| KP2W- | | S | R | R | S | R | R | R | NT |
| P0109 | | | | | | | | | |
| KP2W- | | S | S | S | S | S | S | S | NT |
| P0107 | | | | | | | | | |
| KP2W- | | S | R | R | S | S | S | R | R |
| P0108 | | | | | | | | | |
| KP2W- | | S | R | R | S | R | R | R | NT |
| P0105 | | | | | | | | | |
| KP2W- | | S | S | S | R | R | R | R | NT |
| M0107 | | | | | | | | | |
| KP2W- | | S | R | R | S | R | R | R | NT |
| P0106 | | | | | | | | | |
| KP2W- | | S | S | S | S | S | S | S | NT |
| M0104 | | | | | | | | | |
| KP2W- | | S | R | R | S | R | R | R | NT |
| P0101 | | | | | | | | | |
| KP2W- | | S | R | R | S | R | R | R | NT |
| P0102 | | | | | | | | | |
| KP2W- | | S | R | R | S | R | R | R | NT |
| P0103 | | | | | | | | | |
| KP2W- | | S | R | R | S | R | R | R | NT |
| P0104 | | | | | | | | | |

TABLE 7
Host range analysis of phage isolated against MKP2_2161_1, MKP2_coc_1 and KP2,
including activity against other KP2 mutants and Klebsiella strain KP4. Phage titers
were 1 × 106 PFU/mL. R—resistant to the infection with the tested phage,
S—sensitive to the infection with the tested phage, NT—not tested.
Infectivity at 1 × 10\hat{ }6 PFU/mL

| Phage name | Isolated on | KP2 | MKP2_2161_1 | MKP2_2161_C | MKP2_251_B |
|---|---|---|---|---|---|
| KP2M-M0109 | MKP2_2161_1 | S | S | S | R |
| KP2M-M0105 | | S | S | S | R |
| KP2M-M0110 | | R | S | S | R |
| KP2M-M0111 | | R | S | S | R |
| KP2M-M0112 | | S | S | S | R |
| KP2M-M0108 | | S | S | S | R |
| KP2M-P0208 | | R | S | S | R |
| KP2M-P0204 | MKP2_coc_1 | R | S | S | R |
| KP2M-P0207 | | R | S | S | R |
| KP2M-P0203 | | R | S | S | R |
| KP2M-P0206 | | R | S | S | R |
| KP2M-P0205 | | R | S | S | R |
| KP2M-P0212 | | R | S | S | R |
| KP2M-P0201 | | R | R | R | R |
| KP2M-P0209 | | R | S | S | R |
| KP2M-P0210 | | R | S | S | R |
| KP2M-P0211 | | R | S | S | R |
| KP2W-M0102 | KP2 | S | S | S | R |
| KP2W-M0103 | | S | S | S | R |
| KP2W-P0202 | | S | S | S | S |
| KP2W-M0106 | | S | S | S | R |
| KP2W-P0109 | | S | R | R | S |
| KP2W-P0107 | | S | R | R | S |
| KP2W-P0108 | | S | R | R | S |
| KP2W-P0105 | | S | R | R | S |
| KP2W-M0107 | | S | S | S | S |
| KP2W-P0106 | | S | R | R | S |
| KP2W-M0104 | | S | S | S | R |
| KP2W-P0101 | | S | R | R | S |
| KP2W-P0102 | | S | R | R | S |
| KP2W-P0103 | | S | R | R | S |
| KP2W-P0104 | | S | R | R | S |

| Phage name | Isolated on | MKP2_251_C | MKP2_251_D | MKP2_coc_1 | KP4 |
|---|---|---|---|---|---|
| KP2M-M0109 | MKP2_2161_1 | R | R | R | NT |
| KP2M-M0105 | | R | R | R | NT |
| KP2M-M0110 | | R | R | R | NT |
| KP2M-M0111 | | R | R | R | NT |
| KP2M-M0112 | | R | R | R | NT |
| KP2M-M0108 | | R | R | R | NT |
| KP2M-P0208 | | R | R | R | NT |
| KP2M-P0204 | MKP2_coc_1 | S | S | S | NT |
| KP2M-P0207 | | S | S | S | NT |
| KP2M-P0203 | | S | S | S | NT |
| KP2M-P0206 | | S | S | S | NT |
| KP2M-P0205 | | S | S | S | NT |
| KP2M-P0212 | | S | S | S | NT |
| KP2M-P0201 | | S | S | S | NT |
| KP2M-P0209 | | S | S | S | NT |
| KP2M-P0210 | | S | S | S | NT |
| KP2M-P0211 | | S | S | S | NT |
| KP2W-M0102 | KP2 | R | R | R | NT |
| KP2W-M0103 | | R | R | R | NT |
| KP2W-P0202 | | S | S | S | NT |
| KP2W-M0106 | | R | R | R | NT |
| KP2W-P0109 | | R | R | R | NT |
| KP2W-P0107 | | R | R | R | NT |
| KP2W-P0108 | | R | R | R | NT |
| KP2W-P0105 | | R | R | R | NT |
| KP2W-M0107 | | R | R | R | NT |
| KP2W-P0106 | | R | R | R | NT |
| KP2W-M0104 | | R | R | S | NT |
| KP2W-P0101 | | R | R | R | NT |
| KP2W-P0102 | | R | R | R | NT |
| KP2W-P0103 | | R | R | R | NT |
| KP2W-P0104 | | R | R | R | NT |

### Example 10: Phage DNA Extraction and Sequencing

[0164] Phage DNA was extracted from 0.2 mL of phage at least 1×10⁹ PFU/mL using the QIAGEN QIAamp DNA Mini Kit and the following protocol. After extraction, Illumina libraries were created following the protocol of Baym et al. (2015) and sequenced using paired end 40 bp reads with an average coverage of −250 reads per position.

### Example 11: Phage DNA Assembly and Analysis

[0165] Reads were assembled using SPAdes 3.9.0 and annotated using PHAST (You Zhou et al. 2011). Phage structural genes were analyzed using VIRFAM (Lopes A, et al. Automated detection and classification of head-to-tail connection proteins in bacteriophages, BMC Genomics. 2014 November 27; 15:1027) which clustered them into 3 different families: Myoviridae of Type 2 (such as known phages T4 or RB43), Podoviridae of Type 3 (such as known phages phiYeO3-12, T3 or T7) and Siphoviridae of Type 1 (such as known phages T1, TLS or RTP).

[0166] As can be seen in Table 5, the majority of phages isolated against KP3 strain belong to the Podoviridae family type 3 with genomes ˜40 kb, and only two phages belong to Siphoviridae family with genome size ˜50 kb. All phages but five isolated against KP2 strain belong to Podoviridae family type 3 as well as all phages isolated against KP2 mutant KP2-Coc-M (also referred to as MKP2-Coc_1) and one phage isolated against mutant KP2 MKP2-2161_1. Five phages isolated against KP2 and all phages but one isolated against mutant KP2 MKP2-2161_1 belong to Myoviridae family with a genome ˜180 kb genome, four times larger than the genomes of the Podoviridae.

[0167] As can be seen in FIG. 5, the Podoviruses that recognize KP2 cluster into two clusters with over 83% and 85% percent identity among them. Myoviruses that recognize KP2 cluster in a separate cluster with >86% homology.

[0168] The Podoviruses against KP3 cluster into two separate blocks (FIG. 6) with >78% and >96% identity respectively and the percent of homology between the members from the two different clusters ranges from 38% to slightly over 50%. The Siphoviruses form a distinct cluster with >88% identity between the two.

[0169] Even though better-known phage (e.g., T4, T7 and T1) belonging to the same classification groups as our phage are usually known to be virulent (lytic-only) phage, the phage sequences were annotated using PHAST (Zhou et al. 2011.) to detect specific genes relating to lysogeny. The screening revealed no integrases, recombinases or other genes known to take part in the lysogenic cycle, suggesting that the phage were lytic-only as well, as required of phage for therapeutic purposes. PCR analysis of the two bacterial strains KP2 and KP3 with phage primers did not yield any PCR products.

### Example 12. In Vivo Testing

[0170] The efficacy of the phage treatment is assessed. An in vivo platform is used to test 1) the colonization of virulent strains of Klebsiella pneumoniae in the gastrointestinal tract and 2) their eradication by the phage therapy. In some embodiments, a phage cocktail comprising several phages against a bacterial strain is tested. In some embodiments, the one or more of the phages in the phage cocktail delay the appearance of bacterial mutants and/or target bacterial mutants. In some embodiments, the in vivo platform may be used to test for colonization of gastrointestinal tract, e.g., with pathogenic strains of KP2. In some embodiments, the in vivo platform may be used to compare the inoculation efficiency following single and double administration of the KP2 strain pre-treated with two different antibiotic cocktails to induce colonization. Animals are inoculated with a bacterial culture and treated with a phage or a phage cocktail as described in Table 8. Bacterial burden and inflammation are assessed as described in Table 9.

TABLE 8
Experimental procedure.

| | |
|---|---|
| Mouse strain: | C57BL/6, 8 weeks, male |
| Conditions: | SPF for KP2 |
| Study group: | n = 8 (housed together after SPF verification), n = 8 (housed in |
| | individual SPF cages) |
| Antibiotic | Treatment 1 (group 1-3): continuous administration of the cocktail |
| treatment: | of ampicillin 200 mg/L, tylosin at 500 mg/L and kanamycin |
| | 500 mg/L in drinking water starting 4 days prior to colonization |
| | Treatment 2 (group 4-6): continuous administration of the cocktail |
| | of ampicillin, vancomycin, metronidazole, kanamycin at 1 g/L on |
| | days −16-−3, continuous administration of kanamycin at 500 mg/L |
| | in drinking water starting 2 days prior to colonization |
| Pathogen: | Klebsiella pneumoniae KP2 strain cultured to logarithmic phase |
| Colonization | 10⁸ CFU/animal by gavage in 200 μL PBS, single administration |
| protocol: | on day 0 (day 5 of the antibiotic treatment), or multiple dosing on |
| | day 0 and 1 (day 5 and day 6 of the antibiotic treatment) |
| In-life phase | 15-27 days |
| duration: | |
| Sacrifice | Day 10 |
| schedule: | |
| Readouts: | To assess the degree of Klebsiella colonization throughout the |
| | development, the following readouts are used: |
| | 1. Whole-body and (intestine) imaging using the IVIS system on |
| | days −1, 1, 2, 3, 4, 7, 8, 9, 10 (10 intestine) |
| | 2. Assessment of Klebsiella count in daily stool samples by |
| | plating on growth media and quantitative PCR using strain- |
| | specific primers |
| | 3. Assessment of Klebsiella count in intestinal contents and |
| | mucosa by plating on selective media and quantitative PCR using |
| | strain-specific primers on day 10 |
| | 4. Sacrifice: intestine histology, intestine cytokine mRNA, liver |
| | and spleen bacterial count |

TABLE 9
Study design.

| Group # | Group ID | Pre-treatment | Challenge | Endpoints | | | |
|---|---|---|---|---|---|---|---|
| 1 (4) | Control, no | Antibiotic | Vehicle | 1. | Whole body imaging on day 0 (3 | | |
| | pathogen | treatment 1 | | | hours after the colonization), 1, 2, 3, | | |
| 2 (5) | Single | or 2 (see | 10⁸ day 0 | | 4, 7, 8, 9, 10. | | |
| | administration | above) | | 2. | Overnight stool collection on day −4, | | |
| 3 (6) | Double | | 10⁸ day 0 | | −2, 0, 1, 3, 5, 7, 9, 10. | | |
| | administration | | 10⁸ day 1 | | | a. | Stool plating on LB + KAN |
| | | | | | | | agar plates |
| | | | | | | b. | qPCR on stool samples using |
| | | | | | | | KP2-specific primers |
| | | | | | | c. | luminescence assessment |

| | |
|---|---|
| 3. | Sacrifice on day 10. |

| | |
|---|---|
| a. | Intestine harvesting |
| b. | IVIS on the intestine |
| c. | Segmentation of the intestine |
| | into large intestine, small |
| | intestine and cecum |
| d. | Estimation of the KP2 burden |
| | in the contents of the |
| | intestinal segments by |

| | |
|---|---|
| i. | Stool plating on |
| | Klebsiella agar plates |
| ii. | qPCR on stool |
| | samples using KP2- |
| | specific primers |
| iii. | luminescence |
| | assessment |

| | |
|---|---|
| e. | Estimation of the KP2 burden |
| | in the mucosa of the intestinal |
| | segments using the BagMixer |
| | extraction protocol |

| | |
|---|---|
| i. | plating on Klebsiella |
| | agar plates |
| ii. | qPCR on stool |
| | samples using KP2- |
| | specific primers |
| iii. | luminescence |
| | assessment |

| | |
|---|---|
| f. | extraction of mRNA using |
| | RNAlater kit to potentially |
| | assess cytokine mRNA count |
| g. | embedding intestine sections |
| | in paraffin for potential |
| | histology |
| h. | assessing bacterial burden in |
| | liver and spleen |

### Example 13. Isolation of KP2-Like Clinical Strains

[0171] A volume of 10 μL of stool suspended in buffer was cultured in 4 mL Peptone water (M028, Hylabs) overnight at 37° C., after which 10 μl of the culture was streaked onto MacConkey and Chromagar Orientation plates (Hylabs). Colonies with the ability to grow on the MacConkey plate and presenting a pink, mucoid colony morphology or colonies that appeared blue on the Chromagar plate were tested for motility and the ability to form indole gas using UMI agar tubes (TT-147, Hylabs). A PCR of the 16S rRNA region was performed for non-motile and non-indole producing colonies. The PCR products were sequenced in order to determine identity as Klebsiella pneumoniae. Positive isolations were identified as KP2-like using PCR for a 211 bp unique region (fwd primer:

(fwd primer: 5′AGCACTAGCGGCTGTGGTAT3′ and
rev primer: 5′ACTTACTCGGGCCCTTGATT3′).

### See, e.g., Atarashi et al., 2017.

[0172] Host range analysis for the KP2 phages was performed on 18 KP2-like clinical strains. Each of the phage were added to bacterial lawns of the different K. pneumoniae strains, in BHIS agar plates by drop assay as following: a starter culture of 4 mL BHIS was inoculated with 5-10 colonies from a plate. This culture was incubated at 37° C. for 1.5-2 hours. A volume of 150 μL of this culture was mixed with 4 mL of BHIS top agar (pre-molten 0.4% agar BHIS supplemented with 1 mM Ca²⁺ and Mg²⁺ ions), and poured on a petri dish containing BHIS bottom agar (BHIS with 1.5% agarose). After solidifying at room temperature, the plates were incubated for 30 minutes at 37 degrees. At this stage, 5 μL from samples containing 10⁶ pfu/ml phage was dropped and left to absorb. Plates were incubated overnight at 37° C. in aerobic conditions, after which plaques became visible on the bacterial lawns. Host range was performed for each of the phages at a titer of 1×10⁶ PFU/mL (Table X). For a phage that is able to form at least 10 plaques on a specific clinical line lawn, the bacterial host was determined as sensitive to that phage.

TABLE 10
Host range analysis for KP2 phages (titer 1 × 10⁶ PFU/mL) was
performed on 19 KP2-like clinical strains.
R—resistant to the infection with the tested phage,
S—sensitive to the infection with the tested phage.

| | | CT- | CT- | CT- | CT- | CT- | CT- | CT- | CT- | CT- | CT- |
|---|---|---|---|---|---|---|---|---|---|---|---|
| Phage name | Isolated on | 123-1 | 131-2 | 134-2 | 136-2 | 139-1 | 141-1 | 141-2 | 142-1 | 145 | 147-2 |
| KP2M-M0109 | MPK2_2161_1 | S | R | R | S | S | R | S | S | S | S |
| KP2M-M0105 | | S | R | R | S | S | R | S | S | S | S |
| KP2M-M0110 | | S | R | R | S | S | R | S | S | S | S |
| KP2M-M0111 | | S | R | R | S | S | R | S | S | S | S |
| KP2M-M0112 | | S | R | R | S | S | R | S | S | S | S |
| KP2M-M0108 | | S | R | R | S | S | R | S | S | S | S |
| KP2M-P0208 | | S | S | S | S | S | S | S | S | S | S |
| KP2M-P0204 | MKP2_coc_1 | S | S | S | S | S | S | S | S | S | S |
| KP2M-P0207 | | S | S | S | S | S | S | S | S | S | S |
| KP2M-P0203 | | S | S | S | S | S | S | S | S | S | S |
| KP2M-P0206 | | S | S | S | S | S | S | S | S | S | S |
| KP2M-P0205 | | S | S | S | S | S | S | S | S | S | S |
| KP2M-P0212 | | S | S | S | S | S | S | S | S | S | S |
| KP2M-P0209 | | S | S | S | S | S | S | S | S | S | S |
| KP2M-P0210 | | S | S | S | S | S | S | S | S | S | S |
| KP2M-P0211 | | S | S | S | S | S | S | S | S | S | S |
| KP2W-M0102 | KP2 | S | R | R | S | S | R | S | S | S | S |
| KP2W-M0103 | | S | R | R | S | S | R | S | S | S | S |
| KP2W-M0106 | | S | R | R | S | S | R | S | S | S | S |
| KP2W-P0109 | | R | R | R | R | R | R | R | R | R | R |
| KP2W-P0107 | | R | R | R | R | R | R | R | R | R | R |
| KP2W-P0108 | | R | R | R | R | R | R | R | R | R | R |
| KP2W-P0105 | | R | R | R | R | R | R | R | R | R | R |
| KP2W-M0107 | | S | R | R | S | S | R | S | S | S | S |
| KP2W-P0106 | | R | R | R | R | R | R | R | R | R | R |
| KP2W-M0104 | | S | S | S | S | S | S | S | S | S | S |
| KP2W-P0101 | | R | R | R | R | R | R | R | R | R | R |
| KP2W-P0102 | | R | R | R | R | R | R | R | R | R | R |
| KP2W-P0103 | | R | R | R | R | R | R | R | R | R | R |
| KP2W-P0104 | | R | R | R | R | R | R | R | R | R | R |

| | | CT- | CT- | CT- | CT- | CT- | CT- | CT- | CT- |
|---|---|---|---|---|---|---|---|---|---|
| Phage name | Isolated on | 147-2 | 130-A2 | 130-C6 | 132-A | 132-B | 132-C | 138-A | 128-4 |
| KP2M-M0109 | MPK2_2161_1 | R | R | R | R | R | R | R | R |
| KP2M-M0105 | | R | R | R | R | R | R | R | R |
| KP2M-M0110 | | R | R | R | R | R | R | R | R |
| KP2M-M0111 | | R | R | R | R | R | R | R | R |
| KP2M-M0112 | | R | R | R | R | R | R | R | R |
| KP2M-M0108 | | S | S | S | S | S | S | S | S |
| KP2M-P0208 | | S | S | S | S | S | S | S | S |
| KP2M-P0204 | MKP2_coc_1 | S | S | S | S | S | S | S | S |
| KP2M-P0207 | | S | S | S | S | S | S | S | S |
| KP2M-P0203 | | S | S | S | S | S | S | S | S |
| KP2M-P0206 | | S | S | S | S | S | S | S | S |
| KP2M-P0205 | | S | S | S | S | S | S | S | S |
| KP2M-P0212 | | S | S | S | S | S | S | S | S |
| KP2M-P0209 | | S | S | S | S | S | S | S | S |
| KP2M-P0210 | | S | S | S | S | S | S | S | S |
| KP2M-P0211 | | R | R | R | R | R | R | R | R |
| KP2W-M0102 | KP2 | R | R | R | R | R | R | R | R |
| KP2W-M0103 | | R | R | R | R | R | R | R | R |
| KP2W-M0106 | | R | R | R | R | R | R | R | R |
| KP2W-P0109 | | R | R | R | R | R | R | R | R |
| KP2W-P0107 | | R | R | R | R | R | R | R | R |
| KP2W-P0108 | | R | R | R | R | R | R | R | R |
| KP2W-P0105 | | R | R | R | R | R | R | R | R |
| KP2W-M0107 | | R | R | R | R | R | R | R | R |
| KP2W-P0106 | | S | S | S | S | S | S | S | S |
| KP2W-M0104 | | R | R | R | R | R | R | R | R |
| KP2W-P0101 | | R | R | R | R | R | R | R | R |
| KP2W-P0102 | | R | R | R | R | R | R | R | R |
| KP2W-P0103 | | R | R | R | R | R | R | R | R |
| KP2W-P0104 | | R | R | R | R | R | R | R | R |

1) A pharmaceutical composition comprising at least two different lytic bacteriophage each selected from a different group, wherein the groups consist of:
a) KP2W-P0101, KP2W-P0102, KP2W-P0103, KP2W-P0104, KP2W-P0105, KP2W-P0106, KP2W-P0107, KP2W-P0108, KP2W-P0109, and any other lytic bacteriophage that has at least 83% homology as determined by BLAST to any of the foregoing bacteriophage in a) and is capable of lytic infection of KP2 or a KP2 mutant,
b) KP2M-P0201, KP2W-P0202, KP2M-P0203, KP2M-P0204, KP2M-P0205, KP2M-P0206, KP2M-P0207, KP2M-P0208, KP2M-P0209, KP2M-P0210, KP2M-P0211, KP2M-P0212, and any other lytic bacteriophage that has at least 85% homology as determined by BLAST to any of the foregoing bacteriophage in b) and is capable of lytic infection of KP2 or a KP2 mutant, and
c) KP2W-M0102, KP2W-M0103, KP2W-M0104, KP2M-M0105, KP2W-M0106, KP2W-M0107, KP2M-M0108, KP2M-M0109, KP2M-M0110, KP2M-M0111, KP2M-M0112, and any other lytic bacteriophage that has at least 86% homology as determined by BLAST to any of the foregoing bacteriophage in c) and is capable of lytic infection of KP2 or a KP2 mutant,
wherein the pharmaceutical composition is formulated for delivery to a mammalian intestine or formulated for delivery to a mammalian mouth.

2) The composition of claim 1, comprising at least one bacteriophage selected from a)-c).

3) The composition of claim 1, comprising:
a) KP2W-P0105 and KP2M-P0203,
b) KP2M-P0203 and KP2W-M0104,
c) KP2W-P0105 and KP2W-M0104,
d) KP2W-P0102 and KP2M-P0209,
e) KP2M-P0209 and KP2W-M0107,
f) KP2W-P0102 and KP2W-M0107,
g) KP2W-P0109 and KP2M-P0211,
h) KP2M-P0211 and KP2M-M0112,
i) KP2W-P0109 and KP2M-M0112,
j) KP2W-P0105 and KP2M-P0203 and KP2W-M0104,
k) KP2W-P0102 and KP2M-P0209 and KP2W-M0107,
l) KP2W-P0109 and KP2M-P0211 and KP2M-M0112,
m) KP2W-P0105 and KP2M-P0209 and KP2M-M0112,
n) KP2W-P0102 and KP2M-P0211 and KP2W-M0104, or
o) KP2W-P0109 and KP2M-P0203 and KP2W-M0107.

4) The composition of claim 1, wherein the composition is formulated for delivery to the mammalian intestine.

5) The composition of claim 1, formulated for delivery to the mammalian mouth.

6) The composition of claim 1, wherein the composition is free of lytic bacteriophage that lyse any of Klebsiella pneumoniae strain ATCC BAA-2552 (KP1), KP3, ATCC 13882 (KP5), ATCC BAA-1705 (KP6), ATCC 700603 (KP7), and ATCC 700721 (KP8).

7) The composition of claim 1, wherein the composition is free of lytic bacteriophage that lyse any of Klebsiella pneumoniae strain ATCC BAA-2552 (KP1), KP3, ATCC 23356 (KP4), ATCC 13882 (KP5), ATCC BAA-1705 (KP6), ATCC 700603 (KP7), and ATCC 700721 (KP8).

8) A pharmaceutical composition comprising at least two different lytic bacteriophage, each selected from a different group, wherein the groups consist of:
a) KP3W-P0101, KP3W-P0102, KP3W-P0103, KP3W-P0104, KP3W-P0105, KP3W-P0106, KP3W-P0107, KP3W-P0108, KP3W-P0109, KP3W-P0110, KP3W-P0111, KP3W-P0112, KP3W-P0113, KP3W-P0114, and any other lytic bacteriophage that has at least 78% homology as determined by BLAST to any of the foregoing bacteriophage in a) and is capable of lytic infection of KP3 or a KP3 mutant,
b) KP3W-P0201, KP3W-P0202, KP3W-P0203, and any other lytic bacteriophage that has at least 96% homology as determined by BLAST to any of the foregoing bacteriophage in b) and is capable of lytic infection of KP3 or a KP3 mutant, and
c) KP3W-S0101, KP3W-S0102, and any other lytic bacteriophage that has at least 88% homology as determined by BLAST to any of the foregoing bacteriophage in c) and is capable of lytic infection of KP3 or a KP3 mutant,
wherein the pharmaceutical composition is formulated for delivery to a mammalian intestine or formulated for delivery to a mammalian mouth.

9) The composition of claim 8, wherein the composition is formulated for delivery to the mammalian intestine.

10) The composition of claim 8, formulated for delivery to the mammalian mouth.

11) The composition of claim 8, wherein the composition is free of lytic bacteriophage that lyses any of Klebsiella pneumoniae strain ATCC BAA-2552 (KP1), KP2, ATCC 23356 (KP4), ATCC 13882 (KP5), ATCC BAA-1705 (KP6), ATCC 700603 (KP7), and ATCC 700721 (KP8).

12) A pharmaceutical composition comprising at least two different lytic bacteriophage, wherein
a) at least one bacteriophage is selected from:
i) KP2W-P0101, KP2W-P0102, KP2W-P0103, KP2W-P0104, KP2W-P0105, KP2W-P0106, KP2W-P0107, KP2W-P0108, KP2W-P0109, any other lytic bacteriophage that has at least 83% homology to the foregoing bacteriophage of i) and is capable of lytic infection of KP2 or a KP2 mutant,
ii) KP2M-P0201, KP2W-P0202, KP2M-P0203, KP2M-P0204, KP2M-P0205, KP2M-P0206, KP2M-P0207, KP2M-P0208, KP2M-P0209, KP2M-P0210, KP2M-P0211, KP2M-P0212, and any other lytic bacteriophage that has at least 85% homology as determined by BLAST to any of the foregoing bacteriophage of ii) and is capable of lytic infection of KP2 or a KP2 mutant, and
iii) KP2W-M0102, KP2W-M0103, KP2W-M0104, KP2M-M0105, KP2W-M0106, KP2W-M0107, KP2M-M0108, KP2M-M0109, KP2M-M0110, KP2M-M0111, KP2M-M0112, any other lytic bacteriophage that has at least 86% homology as determined by BLAST to any of the foregoing bacteriophage of ii) and is capable of lytic infection of KP2 or a KP2 mutant, and
b) at least one bacteriophage is selected from:
i) KP3W-P0101, KP3W-P0102, KP3W-P0103, KP3W-P0104, KP3W-P0105, KP3W-P0106, KP3W-P0107, KP3W-P0108, KP3W-P0109, KP3W-P0110, KP3W-P0111, KP3W-P0112, KP3W-P0113, KP3W-P0114, and any other lytic bacteriophage that has at least 78% homology as determined by BLAST to any of the foregoing bacteriophage of i) and is capable of lytic infection of KP3 or a KP3 mutant,
ii) KP3W-P0201, KP3W-P0202, KP3W-P0203, and any other lytic bacteriophage that has at least 96% homology as determined by BLAST to any of the foregoing bacteriophage of ii) and is capable of lytic infection of KP3 or a KP3 mutant,
iii) KP3W-S0101, KP3W-S0102, and any other lytic bacteriophage that has at least 88% homology as determined by BLAST to any of the foregoing bacteriophage of iii) and is capable of lytic infection of KP3 or a KP3 mutant,
wherein the pharmaceutical composition is formulated for delivery to a mammalian intestine or formulated for delivery to a mammalian mouth.

13) The composition of claim 12, wherein the composition is formulated for delivery to the mammalian intestine.

14) The composition of claim 12, formulated for delivery to the mammalian mouth.

15) The composition of claim 12, wherein the composition is free of lytic bacteriophage that lyses any of Klebsiella pneumoniae strain ATCC BAA-2552 (KP1), ATCC 13882 (KP5), ATCC BAA-1705 (KP6), ATCC 700603 (KP7), and ATCC 700721 (KP8).

16) The composition of claim 12, formulated for oral or rectal dosing.

17) A method of treating an inflammatory bowel disease comprising administering to a subject in need thereof a composition of claim 1.

18) The method of claim 17, wherein the inflammatory bowel disease is ulcerative colitis.

19) The method of claim 17, wherein the inflammatory bowel disease is Crohn's disease.

20) The method of claim 17, wherein the inflammatory bowel disease is associated with proton pump inhibitor therapy.

21) The method of claim 17, wherein the inflammatory bowel disease is associated with primary sclerosing cholangitis.

22) The method of claim 17, wherein the subject is infected with a bacterium selected from KP2 and KP3.

23) The method of claim 17, wherein the subject has been determined to be infected with a bacterium selected from KP2 and KP3.

24) The method of claim 23, wherein the determination of the KP2 and/or KP3 infection is assayed by PCR.

25) A method of treating an inflammatory bowel disease in a subject, comprising administrating the composition of claim 1 to a subject infected with a bacterium selected from KP2 and KP3, thereby treating the subject.

26) The method of claim 15, wherein the composition is orally or rectally administered.

27) A method of determining a subject to be treated with a KP2 bacteriophage, comprising the steps of:
a) obtaining a biological sample from the subject;
b) culturing bacteria obtained from the biological sample;
c) inoculating the cultured bacteria with a bacteriophage selected from one or more of:
i) KP2W-P0101, KP2W-P0102, KP2W-P0103, KP2W-P0104, KP2W-P0105, KP2W-P0106, KP2W-P0107, KP2W-P0108, KP2W-P0109, and any other lytic bacteriophage that has at least 83% homology as determined by BLAST to any of the foregoing bacteriophage of i) and is capable of lytic infection of KP2 or a KP2 mutant,
ii) KP2M-P0201, KP2W-P0202, KP2M-P0203, KP2M-P0204, KP2M-P0205, KP2M-P0206, KP2M-P0207, KP2M-P0208, KP2M-P0209, KP2M-P0210, KP2M-P0211, KP2M-P0212, and any other lytic bacteriophage that has at least 85% homology as determined by BLAST to any of the foregoing bacteriophage of ii) and is capable of lytic infection of KP2 or a KP2 mutant, and
iii) KP2W-M0102, KP2W-M0103, KP2W-M0104, KP2M-M0105, KP2W-M0106, KP2W-M0107, KP2M-M0108, KP2M-M0109, KP2M-M0110, KP2M-M0111, KP2M-M0112, and any other lytic bacteriophage that has at least 86% homology as determined by BLAST to any of the foregoing bacteriophage of iii) and is capable of lytic infection of KP2 or a KP2 mutant, and
d) determining whether the cultured bacteria are lysed by the bacteriophage,
wherein when any of the cultured bacteria are lysed by the bacteriophage, the subject is determined to be infected by KP2.

28) The method of claim 27, wherein the determination of the KP2 infection is assayed by PCR.

29) A method of determining a subject to be treated with a KP3 bacteriophage, comprising the steps of:
a) obtaining a biological sample from the subject;
b) culturing bacteria obtained from the biological sample;
c) inoculating the cultured bacteria with a bacteriophage selected from one or more of:
i) KP3W-P0101, KP3W-P0102, KP3W-P0103, KP3W-P0104, KP3W-P0105, KP3W-P0106, KP3W-P0107, KP3W-P0108, KP3W-P0109, KP3W-P0110, KP3W-P0111, KP3W-P0112, KP3W-P0113, KP3W-P0114, and any other lytic bacteriophage that has at least 78% homology as determined by BLAST to any of the foregoing bacteriophage of i) and is capable of lytic infection of KP3 or a KP3 mutant,
ii) KP3W-P0201, KP3W-P0202, KP3W-P0203, and any other lytic bacteriophage that has at least 96% homology as determined by BLAST to any of the foregoing bacteriophage of ii) and is capable of lytic infection of KP3 or a KP3 mutant, and
iii) KP3W-S0101, KP3W-S0102, and any other lytic bacteriophage that has at least 88% homology as determined by BLAST to any of the foregoing bacteriophage of iii) and is capable of lytic infection of KP3 or a KP3 mutant, d) determining whether the cultured bacteria are lysed by the bacteriophage, wherein when any of the cultured bacteria are lysed by the bacteriophage, the subject is determined to be infected by KP3.

30) The method of claim 29, wherein the determination of the KP3 infection is assayed by PCR.

The application's sequence listing, which the Patent Office published only in electronic form, follows.

SEQUENCE LISTING (290 sequences)

SEQ ID NO: 1 - DNA, 40168 bp, Unknown
  source: /note="Description of Unknown: KP3W-P0101 Bacteriophage sequence"
tatctgttggtactcattgagtcacacccgatgtaaccacctgaggttagacctgagaccatattaccttaggttcaccgtttgactaacgtttagcagtgactgttagtaggtcacatagagtaatcacttaagtatctcgtttagcagtccctgagacactgagagcgggacaatagggtatcggtgagtcatcactataagggctattggtggtcagtgtcaatacatcattaatcaattctattaggacacactatagggagacacttagagtattactaagagaccattaccaatagaacactatcactataggtctaaccaaaagtttaactttaagtgttgacattcagattccgttatgagacattagcaaccgttgagagacacaacgtcaccaacaaccagacaataccacgagttatctggttagactgagggtctcaagtagtcatcaaccggacatacgaaaatggttgactcaacggataacatgaagtaacatgcagtctcagtaacacgcagtacctagtagcaccgctctttaacaatatggattagtcaagctgatatgtacaccatgacaatagtgtttaactagtggttgcattcaggtctctggcaaggtacgtcctgtcaccctgagagtaaccacaacgataaccactaaccaattgaggatacatagcatggaaatcgtaatgcaggcactgaaccacggggtcattatgacaacagcacgggactacaccggggccaccaaatacatggtgcaatacggcttacagttcaccgtgttcgactcattccgtgaggcactgcaagattacacagattgcgtcacccattcgcaagagtgtggggactagcggttaacgacaggtcatccaagtggtggcctgaaagataaccactaacgcaacattgaggatatacaccatggaacgcaacgctaacgcatactacgaccttctggctgcaactgttgagctgttcaacgagcgcatccaacaggatgaactcaccgagcatgacgactggtctgatgcactgcacgaggttgtagacgggcaggttccgcactattacagtgagattttcacggtgatggctgccgacggtattgacattgagttcgacgattcgggtctcataccggacaccaaagatgtaagtcgcatctgtcaagctcgcatccatgaggcgctgtacaacgacgtcttgaacgactctgggattgtctggtatgaagcggatgaagacgaagaggatgactgcgatgattaaatatggcctcactcaggagcacttaaagttataccgcacggctatggcatacggtgcatcattcggttactgtatggcccaactggcacaaacctatcgcacacgcaaggtaatgtatgctaaccctgttcgtaattagtgtgtacgccatgattgtcctgtactttgtgcgggactttcgtaagggtctcaaggtacacaaagcatcattcagttacatgaagtggggcttcttgcctcgctttactgtacggctacctaatggccgctttaaggctaacaaggtaggtattttctacatcgcaacccattgacataccacataaggaaacaacctaatgaactacaccgacatgcaagaacgtttagacgtcatccgtaacctgccaatctgtgaactcgacaagcgccagccgctgctggtagaactgctcgctgacattgtgaacgctgagacgtccgacggtgacgatacggacagcgattgtggtcttgagcgtcaggactattggcaaaccctgaagattaaggccaaggacgctgggtttaacctactgggcaatggtcacttcagcgcagcgtttaagcacgagctgctaccgggtagggttattaaggttggctttaagaaagaggactctggtgccgcctacgtagcattctgccggatgcatcaaggacgtgacggtattcctaacgtctatcacgtagcccgccacgctgggtgctacacggtggtacttgatgagttgttaccgtgccaacgctgcgaggatgatgaccacgatcattacgcagacttagcgtttcaatttgttgagtgcacaggctacgaccctgaggattaccgcaaggatgaccagccgttcatagaaacgtgccagatgattcgcaagttcttccatggtatcgcatccttcgatatgcacagcggtaacatcatgttcaccaaagacggtaagccagtgattaccgacccggtgtcattctcagcggaccgggaccgtgagcctttctcactggaacctgaggaactgctcgtagagattgagcagatagcgcacgacaagatgattgaacgctgtaagcgcaacaaggctaagcgagaccctaacggagagctgcgcatcgcacgccgtaaggccaacaaggcacgccgtaaggcctacaaggcacacgctaggtggcgtaaggagcgcgagcggattaatgctgaggccctaaagtatgacctagcgaaaatcgagcagcgagtacacgcatggatggcttgtgatggtctcgccatacagcagggtcggggccttccggtggacaactaccttcagggtagacttatgggttaacgaggtgtatcttaggtgtctccgaacggtgaggcacccatagataaactttattcacaaagaggcacacaatgaacgcattaaacatcgcacgtaatgacttctcagagattgaactagccgctattccgtacaacatcctcagcgagcactacggggacaagctggcacgcgagcagttagcgctggagcatgaagcgtacgagctgggcgagcagcgtttcctgaagatgctggaacgtcaggtcaaagccggggagttcgctgacaacgtggcagctaagccgctggtcttaacgttgcacccacagctgaccaagcgtattgacgactggaaggaggagcaagcaaacgctcgcggtaagaagccccgcgcgtactacccgattaagcacggtgttccctctgagttggctcttagcatgggcgctgaggtgcttaaagagaagcgcggagtgtccagtgaggcaatcgcactgctgaccattaaggttgtcttagggacgctcacagacgcctctaaggccaccatccagcaggtgtcctcacagttaggcaaggcccttgaggacgaggcccgcttcggtcgtatccgtgagcaggaagccgcctacttcaagaagaacgtagcggaccagctggacaagcgcgtaggccacgtgtacaagaaggctttcatgcaggtggtcgaggccgatatgatttccaaagggatgctggggggtgacaactgggcgagctggaagaccgacgagcagatgcacgtggggaccaagctgctggagctgctcattgagggcactggtctggtggaaatgaccaagaacaagatggccgatggctccgacgatgtgaccagtatgcagatggtccagatggctccggccttcgtggaactcctgagcaaacgagcgggagcactcgcaggtatcagcccgatgcaccagccgtgcgtagtccctccgaaaccttgggtggaaacagtaggtggtggctactggtcagtaggtcgtcgcccgctggcactggttcgcacccactccaagaaggcactgcgccgctacgcagacgtgcacatgccagaggtatacaaagcagtcaacctcgcgcaaaacacaccgtggaaggtgaacaagaaggttctggcggtagtcaacgagattatcaactggaagcactgcccggtctcagacgtcccagcgattgaacgcgaagagttaccaccacgcccggacgatatcgacaccaacgaggtggcacgtaaggcatggcgtaaggaggccgcagctgtctaccgtaaggacaaggcccgccagtctcgccgtttgtcgatggagttcatggttgcgcaggccaacaagttcgctaaccacaaggccatttggttcccgtacaacatggactggcgtgggcgtgtgtacgctgtgagcatgttcaacccgcagggtaacgacatgaccaagggtatgctgacactggccaagggcaagccaatcggtctcgatgggttctactggctgaagattcacggtgcaaactgtgcaggcgtcgacaaggttcccttccctgagcgcatcaagttcatcgaagagaacgagggcaacattctggcgagcgcagcggacccactgaataacacttggtggacacagcaagattccccgttctgtttcttagcgttctgcttcgagtacgcaggtgttaagcatcacggcctgaattacaactgctcgctgccgctggcgttcgatgggtcatgctctgggattcaacacttcagcgcaatgctccgcgattccatcggtggtcgtgcggttaacctgctgccctctgataccgtgcaggatatctacaagattgtggccgacaaggttaacgaggtgctccaccagcacgctgtcaacgggtctcagacggtggtcgagcagattgctgacaaagagactggtgagttccgcgagaaggtgacactgggtgagtctgtgctggccgcgcaatggttgcagtacggtgtgacccgcaaggttaccaagcgttccgtgatgactctggcgtatggctccaaggagttcggtttccgtcagcaagttcttgaggacaccattcaacctgctattgacaacggcgagggcctgatgtttacccatcctaaccaagcggctggctacatggctaagctgatttgggacgctgtgaccgtgaccgtagtggccgcagtggaagcaatgaactggctcaagtccgccgctaaactgctggccgctgaagtcaaggacaagaagactaaagaggtactccgtaagcgctgcgcaatccactgggtaacaccagatggcttcccggtgtggcaagagtaccgtaagcagaaccaagcccgcctgaagctggtcttcttgggccaagctaacgtcaagatgacgtacaacactgggaaggactcagagattgatgcacacaagcaggaatccggcatagctcccaactttgtacactcacaggacggtagtcacctgcgcatgaccgtagtgcacgccaacgaggcctacgggattgactccttcgctctcattcacgactccttcgggaccattccggcagacgctgggaatctctttaaggcagtccgtgagacgatggtcaagacctacgaggacaacgatgtaattgctgacttctacgaccagttcgctgaccagctgcacgagtctcaactggacaagatgccagcggtcccggccaaaggtgacctgaatctgcgcgatatcctagagtctgacttcgcgtttgcataaggtctcaggcaattagggcacactatagggaaccttcgaatgaccgagggttccattacttaaagtcttaacttaaagaatacttaaagaggcacaccatgtaccagaacgcaatcaactttgagcgcacccgtgaacgtcagcagaccgagggttacatccctaagggccgcaagctgaataagacccagcgtggtggcggggtgaaaggttctttccgtaacgctaaaggtgacagcattgttaaccaagagaaatacttcgtaggagcgtaacaaatggctacggaaaaaagatggcttttcgatggaagcacctcacaatggtctcgtttaggagcagcggagcgtagactaatggatacgacaggactgcacgtggtcatgcttgatgacccattcactaacaccgtactgttcaacgtgttcgagccacgcgggtcacttctaataagcaagcggttcagccactggtcgattgactcagcgtcagactggctggcaaaactcgcggccgactactcaagctggaagtaattagggcacactataggcagactcaaggtcatcgacattcggtggcctttatgattgcttattgcacattaattaaacactatctggagacatcctcatgacgatgcacattaagactaatccctataaggcggtatccttcgttcgctccgccatcgagaaggcgctggaagtatccggttacctcatcgcagacactaagcacgatggcgtgcgcgggaatatttgcgtagacaacacggccaacgcagcatggctcagccgggtctccaagaccattccggcacttgagcacctcaacggtttcgaccagcgatggactaagttactgaaagatgaccgctggattttccctgatggctttatgcttgatggcgaactcatggtcaaaggcgtggacttcaacaccgggtctggcctacttcgcaccaagtggctcaaagagaccaactggatgtactccaccaaggatggggtggtgaaaggtaagaaggaacctttcgagctggataccaagcagctaaaagttgtcctctacgatatcattcctcttgacattatcgagtcaggtgatgactacagcgtaatgaccctcctccgccttgagcacgtcaaggttgccttaccagtcctgcaagaccacttcccggaagtcgagtggtgcctctcggagtcccatgaagtttacgacatggacgaactcgatgcgctgtaccgacagaaacgggaagaaggtcacgaaggtctggtggtcaaggaccctcagggcatctacaagcgtggtaagaagtccggctggttcaagtgcaagccgaacgatgaagccgatggaatcattcagggagtcaattggggaactcccggtcttgcaaacgagggcaaagtcatcgggttctctgtgcttcttgagacaggtcgtttagtagacgccaacaacatctctcgcgcactgatggatgaatttactgccaacgttaaggaacacggcgaggaatactataatggctggtcttgccagattggctatatggaggagacgaaagatggttcattgcgacatccctcattcacctgcttcaggggaactgaggacaacccaagcgagaaaatataagtatagcaaagcggctccttcgggagtcgtttcagctactggtaagcccatcggctataagcgtaaagacgggtactggctgttatcatatggcggaaagcacctgctggcacacagagtggtctggatgcttaacttcggagtaatcccagaaggactagtgatagaccatattaatagagaccctagcgacaatcgcattgaaaacctgagagctgtaaccaccagcatcaacaatgcaaatagcaaagtcaggtcccattgtgtaagcggtgagaaacatgtagcagttgataagagaactggcagattcaccgtcaggattcgtcgcaaatcgtatggaacctatggaaccattgcggaagccatagctgtacgagacgcagttattaattaggacccactataggagacaccaaatgtctatcgacctgattctaatcatcgtgttcatcctcgcggctatcgtgtggtcgatgaacgacgagccaccaaaaggagcataaccatgcgcttacacttcaacaaatcaaacggtatcttctcggttcgccgggaggaccgcagcactgtggcagcctctgagcgccacggtaagattccacgcatcggcgacaccttcgagctggcacccagcgtgcacatcttggttactcgcggtctctacgaattggctcagactaagagccgtcctttcgtacccgtagtggtaaccaagtggccgcgtctgcgcctgttctgggagcgtatcaaggaggttgttaatgagtaagtcagcaccttatatcctaaggcacgcggaccactgtgcatcgctgcatagttttcgtgcgtgcgactgcgggctaaaaccagttccggtaaaggaatctaacacagataccgacgacggtgttaaacagccaagccactaccagctgttcgagggtgtagaggccatcgaggtgattgctcgcagcatgactaaagagatgttcaaagggtattgcctcgggaacatcctcaagtaccgcctgcgggctggtaagaagtccgagctggctaccttagagaaagacatggcgaaggccactttctatctggagctatacaccaagcacaagggtctgtgttatgacgcctagtgaatggtgccgagcgatgtacgagaagacgctcgaccctgcgtacatcaccctgtacaacatgtggaaggagcgagaagatgcaaaagttcgtcgtaacggtcgagacagctaacgcatcgtacgaactcccggtacacgctgggtctcttgaggaggccctcgaagtagccgaggcggagtacgaagagttaggccaagtgactcgggtacgcccggatagtcattaggacacactatagggacacaggttgtccctctttctgttataaaccaaaggagattcaccatggcattcgctaagaagaaaatttacaccaccaagattggtacctgtgagccatacgcttacttcaacaagccggactttggtggtgagggttttgagaacccacgcggtacctacaagggttccgtaacgttcaagaacgaagactgtcaggagttggtagacctcatcgttaagacccatgaggaaaactacgctgctcgtctggaagcacacgaagcgaacccgcctaaggttcagaagggtaagaaacctctgaagccgtatgaaggcgacatgccgttcttcgacaacggtgatggcaccaccacgttcaacttcaagtgctatggttcgtacgaggacaagaagaccggcgagaccaagaagattgttctgggcgtagtagacgcgaagggcaagcgcatccaagacgttccgattatcggcggtggttccaaagtgaagattcgcttctctctggtaccgtatggctggtccgctgttgcgggtgcctccgttaaattgcagctggaaggcgtgatgctggtcgaactggctacctttggtggtggcgaagatgactgggctgacgaagctgtagaaggcggttacgaagcggacgaatctcgcagccgcaaacctcaggaagacccggaggactggtctggtgaggaaggggacgagggtgaagccgaagaagatgatgacttctaatggctggatacggagccaaagggattcggaaggtgggtgccttccggtctggccttgaggacaaggtgtccaagcagttagaatcaaagggcgtcacgttcgactacgaattgtggcgcatcccttacgttattcctgcgagtgaccacctttacactccagacttcttgttgcccaacggtatcttcgtggagactaagggtctctgggaagccgaggaccgcaagaagcacctattgattcgtgagcaatacccggagttagacatccggttggtgttctcttcgagtcgcactaagatttacaaagggtcaccaaccagttacgctgagtggtgcgagaagcataacatcttgtttgccgacaaattgattcccgtagactggctgaaggagccgaagcgtgatgtaccgttcggcaagttcaaacagaagaaaggagcaaagtagtatggccaaagttcaattcactaagcgcaatgagacctctcagattttcgttcactgttcggccaccaaggcaaccatggacgtaggtgtccgtgagattcgacagtggcacaaagagcagggatggttggatgtaggatatcacttcatcatccgtcgggatggtaccgtcgaggcaggccgtgaccaagatgctgtagggtcgcacgtcaagggatacaactcgacttctgtcggcgtgtgtctggtaggtggtatcgacgccaagggtaatcacgaggcaaacttcacgccagcccagatgcagtctctgcgttcactgctggtagaactgaaggtgcaatactctggggccgttctgatggcacatcacgacgtagcgcctaaagcctgcccgagcttcgacctgaagcgctggtgggagaagaacgaactggtcacttctgaccgtgggtaaacattagggcacactacagggagacaattacgtttccctgttgtcgcttgaggaggtcactttatgaacaagttcaaagaatgctttgacccaatcccgttcctagcgtatgggctgctgggactgtgggcactgtccttcgtggtctcgtttttcctatcgtgtatcaacggtaccgcattatgagttacggagacagccaagaagacggtcaggagagtatcttcctgttccacgctccgtgcgaaaactgtggttcttctgatggtaactcagtgtactctgacgggcatgagtattgcttcgtgtgtcaacaccgggttcccggctcagaggaacgtaccgaaaagttatcatcgagaagacccaaaggagggaattacgggatgaatacacaaggttcaggcttattggtattcggtgagagtgacggtcggtacactgacctgaccgctcgttgtatctcaaaggcgacatgccagaaggctggctattgggtcgccaaggtccgtgggacagcttatcaagtggccgactatcgtgaccagaatggctccatcgtctctcagaaactgcgggacaaggagaagaacttctctacccgagggtctcacaaaggggatgcactgtttggtaagcacctatggaacggtggcaagaagattgtcatcaccgagggcgaaatcgacatgttaaccgtgatgcaacttcaggattgcaagtggcctgtagtttctctcggtcacggcgcgtcagccgctaagaaaacttgcagtgcaaactatgagtatttcgatagcttcgaccagattatcctgatgttcgacatggatgaccccggtcgtgaagccgttgaggaagctgctcaggttctccctcccggtaaggtccacgtggccgtgttaaccgagaaggatgccaacgagtgtttactcaaaggcaagggcaaggaggtcctcgaccagatatggaacgcggccccttgggtacctgatggtgtcatcggcgcgatgtccatgaaggaccgagtgcgtgaggccatgaccagcgaacagagcgtaggataccttttctcgggatgtccgggactgaatgaccgaaccttgggtgcacgtggtggcgaagtcatcatggtcacttctgggtcaggaatgggtaagtctacgttcgttcgccaacaggccctagggttcgccagagggcaaggactgcgggtcggtatggcgatgcttgaggaatccgtagaggagacaatggaggatgtcctagggattgccaatggtatccgcttacggcagcagcctcgggagttcaagcagaaactcattgaggatggtacgtatgacaaatggttcgatgagctgtacggcaccgaccagttccatctctatgactcctttgcggaagctgaggtagaccgcctgctggccaagctgcactacatgcgcacagggttaaactgtgacgtaatcattctggaccacatctcaatcgtagtgtcagcctcggaggaatccgatgagcgcaagatgattgaccgactcatgaccaagctgaaagggttcgctaagtcaaccggagtggtacttattgttatttgccacctgaagaacccggagaaaggtaaagctcatgaagaaggacgtgctgtttccattactgacctgcgtgggtctgggtctctgcgccaactctctgatactatcattgcccttgagcgtaatcagcaaggggacatgcctaatcttgtcctccttcgtattctcaagtgtcgctttaatggtattggcgttggcattgcagggtacatggagtacaacgaaaagaccggactccttgaaccgtctagctacactggcggagaaggagagggtgatactggctgggaaggacacgaagaagacgactactgagaagtgtcaatgcccagcgtgtgactgggcgtcaccatattgtaaccactaaaggagaatcgccatgtttaaacttatcgaatcactgggccgtctggtcatcgcgctgtatatccgtgaagccaaggcactggacaaagcgtccaaggtggaagcgaaggcagctgctaagctggctaaggccgccgacaaggcacgtcaggcatctctggatgcaaccgcagaggcagctaaagttgccgctaaagcccagaaacttaaggagttcttctaatgactaccaaagctaaattccccggcaacaccattcagctgtccgacactgtagaccagtggggccgcaaggttcacatcaacgttcgcaacgacaaggtgactctggtataccgctggaaggctaagagcgataaccgtgcgcacactcagcgcatgacccttgacgatgtacaggctgctcgactgctggcatccgtggccgtagccgctactgtggctattggtgaggacaaagtgcgtgaggtaatcctgagtaaagagattgacgaaacgtccgtgcgtctggccgaggcgtcagaagttaagtgataaactcaaggtcattactatatgtagtggcctttatgattatcacacacaacatattgaggaggcagtatgcacaaacttacgaaagtacagacagtccagtccttactgtctcgtacagttcccaatggggaatgccttgagtggactggaagtcttagaagtggttacgggagggtaacgactcagggcaagggctggacggtgatacgcttaatctgggaattacgtaacggccctatagataagggacttgttgtccgacacaagtgcgacaataggaagtgttgtaatcctgagcatctcgaattgggaacgagagccgacaacatgaacgataggttcattcgcggcggttacagcatgtacccaagcatagaatcggtagtaagtctacggcgcatcggattgacacaaggcagtatagctgcgttcttcggtgtaacacagggtcatatctcccggatttgtagcggtgagtatcgaggtgcaaagtgttagttacggatatcgaggccaacaacctcttagagaaagtcactcagttccactgtggggtcatctatgactacagtacggacgagtacgtatcgtatcgaccttgggacttctcagcgtatctcgatgcgttggaagctgaggtggctcgtggtggtctcatcgtattccacaacggtcacaagtatgatgccccagtgttaaccaagctagccaagctccagttaaaccgagagttccacctgccgagagagaacgtagtggacacattggtgcttagtcgtttgctgtttgcgaacattaaggactccgacatggccctgctgcgttccggtaagttacccggtaagcgcttcgggtctcacgctctggaggcgtggggttaccgcttaggcgagatgaagggtgagtacaaggacgacttcaagaaactccttgaggagcagggagaggactatgtggacggctccgagtggattagcttcaacgagccgatgatggactataacgttcaggacgttgtggtaaccaaggcgctcttagagaagctactgagtgacagtcactatttccctgaggatatcgaactgtatacccacagctactctatggaacatccgttctggacactctcctgcgaggccatctggctggaacaccgagccgcttggttactcgctaagcaggagcgcaacggattcccgttcaacaccaaggccattgaggaactctacgtcgaactcgcgggtcgtcgttctgaactccttcagacactcaccgacactttcggaacttggtatcaacccaagggaggcactgagttgttccttcacccgcgcaccgggaaacctctgggtaaatacccacgagtgaagtacccgaagcagggtgccatctacaagaaacccaagaacaaagctcagcgtgagggtcgtgaaccctgcgagctggacactcgggattacgtagagggcgctccgtatacgcctgtagagcacgttgtgttcaaccctagtagccgagaccacattgcgctcaagctgaaggaagccggatgggtaccaacagagttcaccgacaagggtgcacccaaggtagacgacgaggtccttgagcacgttcgtgtggaagaccctgagaagcagcgctgcatcgacctcatcaaagagtacctgatgatacagaagcgtatcggtcaggcagctgagggtgacaaagcgtggctacgttacgttcaagaggatggtaaaatccatggaagtgttaatcaagaggatggtaaaatccatggaagtgttaaccctaatggtgcagttacagggcgagcgacgcacagcttccctaaccttggtcaagttccgggcgttcgttcgccgtatggtgagccttgtcgagcagcgttcggcgcagagcatcacttggacggacttaccggaaagccttgggttcaagctggtatcgacgccagcggactcgaactccgttgtctggcacacttcatgtctaagtacgacgacggggcatatgcggatgtcattctcaacggtgatatccacacagtcaaccaaacggcggctgagttgccaacacgtgataacgccaagacattcatctacggtttcctctatggtgctggagacgaaaagattggacagattgtgggcgcaggtaaggaacgcggaaaggaactcaagaagaaattccttgagaacacccccgcaatcgcagcgttgcgcgaaggaatccagcagaccctcgtcgagtcatcccgatgggttgccggagagcagaaggtcaagtggaaacgacgctggattaagggactggatggaagaaaggtacacgttaggtcaccacatgccgcgctcaacacgttgcttcagtcagcgggtgcgctcatttgtaagctgtggattgtcgagactgaagagttgcttcttaaagcaggcttgaagcacggatgggatggcgactttgcatacatggcatggatacatgacgaaattcaggtagcatgtcgtaccgaggagattgcacagactgttatcgatattgctcaacaagcaatgcgcaacgttggggaccacttcaagttccgctgccgtctggacacagagggcaagatgggaccgaactggaaagagtgccactaaggaggatttatgggaggcgtagcaaccctgaggtttcacacaatgcctaccgggtgtatcgtctgcgtttcccataagcggaatcatgatggatactttcggtattcaataggctcttaccgtaagggaacaaagttttccttcatgtttcaccgctgggtgtgggagcagcacagaggacccataccggaaggttacgagatagaccacctctgcttaaaccgtgggtgctgtaacatagagcacctacaatgcatcaacggtacagagcatacaatcaagactaaccgcgagcgtagactcgtcaagtaacaggagattcaccatgggtatgaacaaacagtttcgtgtaacgttcgacgtaacggcaacactgagtgacgaccaagagcaggagttccttaaggacctgcttgaactggctcacggcgtggatgacaagcagcaggcgcacatcgtcaccgaggcagtcaccaacggacacgaggcagcgctcgccttcgttctacagagcggtctgcgtgaagcaatcaaggacttaggcaaggaggtcaactgtgagtcagtgaccgtacgcttctccccagcaatcgtgagggtgaccaagtgagcgagtacctcaaagttctggcggccctcaagggctgccctaagtccttccagtcgaactacgtgcgcaacaacgctgcgttagtcgctgaggctgcgagccgtggtcacatttcgtgtctgaccatgagtggtcgcaatggtggcacttgggaaattaccagtgccggagtgaaattccttaagacccatggaggttgcttatgaaggactttttaggccaagaggtatcagtaggtgaccgcgtggtaattacctcgtatggtggctacgggctgtctaaaggtaccattgagaagataaacccaaagaccgtagtggtgcgcacaagccccggaaagtacgggacaactcgtaagggacctgagtatttcgtaaagattcaggaggtgcccagtgagtaagcacacattgttatctttcagtaactaccgggcaacccagaagattgccaaaggtgtccttgtgatggatggtgactggctggtgttccaagccatgagcgcagctgagttcgatgcctcgtgggaggaggagatttggcaccgttgctgtgaccactctaaggcccgtgagattctggagaactccattgagtcctacaagggtcgtaagaaggcatggaagaatgctgacgttgtcctagcgttcactgaccgtgtcaactggcgtaagctgctggttgacccaacgtacaaagagaaccgagctgtcaccaagaagcctgtaggttacttcgagttccttgagtacgtcttcgagacctacacgtgcgtccttgagcctcagctcgaaggtgatgacgtgatgggcatcattgggtctaaccccctcgtgtacaactacgagaaggctgtactggtctcctgtgacaaggactttaagaccatcccagattgtgatttcctgtggtgtacgactggtaacatcctcgtgcagactcaggagacagctgactactggcatctcttccagactatcaagggcgacatcaccgatggttacggtgggattcctggatggggtgatacagctgaggacttcctcaaggaacccttcattgtggagcctgtaacgtccatactgaagtccggtaagaacaagggccaagaggtaaccaagtgggtgaaacgcgctcctgagccgggagagacgctctgggattgcattaagtccattggtgccaaagcagggatgaccgaagcggaagtaatcaagcagggccagatggctcgcatcctccgttctgatgagtacaacatcgagacgggggagattactctatggcaaccgggcagctgattctcatcgtccagaccatgggcttagtcgctcgtggtctctggatgttggccttgattatcaagcagatagtcgagcataaagcagagtgataaactcatgggcacaattaggacccactatagggaagtgcccattatgattattacttaaagattacttaaagaggagactcaaatgttaaaacctatagagcacatccttaacaatcctaatgaccttcctgacgtaccgcgagctgtcaaggagtacctacagtctcgcttcaatgctgacttcctgtatcagtcagaggtccgtaagctgcgtgaggctggccacagtgaggagttcatctccggtgtactgtatggtcactacatggcttcgcgtgtccttgacgagatggagggccgtcagcgtgcactcaaagaaggagattgattatgtgtttctcacctaagatgaaagcacctaaggtcgacacaacgactgttcctgagccagctccgctcactgaggaacctaagggtatccagtacggtggcgatgaggattcaaacagtacgacacctgaagtatctggccgcaagtctctcaaggtagccaagacggataccgctgtaggctcgcaaagtaaaatccgtaagtcagctttaggaggctaacatgggactgttcaagaaaatcaagaaggctatctccaaggtagctaaggcaccactgaaagctgtgggtctggccgctgatgtaccaaaccaacaggctgccgcagagacagctgtagctgcgcctcaggaagcaccgaaggaggtcgtagaggacgttgagtcttctgccgacaccgagtctggtcgcaagaagtcccgagcgtccggcaagaagtccctctcagtttcccgcagctcaggcggtgggattaacttatgattggttacggggagggctaacaaatggcagaagttaaactcgaaggcttcgcagaggagggagccaaggcggtgtatgaccgtctgaagaacgaccgacaaccttatgagacacgagcagagtcctgtgctcagtacacgattccctcgctgttccctaaggactccgataacgcctcaaccgattacacgactccgtggcaatccgtaggtgctcgcggcctgaacaacctagcgtccaagctgatgctggccctgttcccgatgcagtcatggatgaagttgaccattagtgaatacgaagcgaagaaccttctaggtgacgcagagggtctcgctaaggtcgatgagggcctctcaatggtagagcgaatcatcatgaactacatcgagtccaacagttaccgagtgactctctttgagtgcctgaagcaactgtgtgtggccgggaacgcactgctgtacttaccggagcctgagggttacaccccgatgaagctctatcgcctgaactcgtatgtggtccagcgagacgctttcggtaacgtactccagattgtcactctcgacaagattgcgttcaacgctctccctgaggatgtccgtggtcaagtggaagcagcccaaggtgagcagaaggaagacgctgagattgacgtctacacccacgtgtacctgaacgaagctggggatggatactcgaagtacgaagaggttgccgaagaggtagtaccgggcagcgaagctgagtacccactcgaagagtgtccgtacattccggttcgcatggtacgcatcgacggtgagtcctatggtcgttcctacgtggaagagtatctgggtgacctcaagtccctagagaacctccaagagtccatcgttaagatggccatgattaccgctaaggttatcggtctggtagacccggcaggtatcactcaggtccgacgactcacggcagcacagtctggtgcgttcgtaccgggccgtaagcaggacattgagttcctccagttggagaagtccggtgactttaccgtagcgaagaacgtaagcgacaccattgaggctcgcctctcgtatgcctttatgctcaacagtgcggtacagcgtacaggtgagcgtgtcacagccgaagagattcggtacgtggcgtcagagctggaagataccctaggtggtgtctactcgattctctcgcaggaactccagctgcctctggtaagagtgctcttgaagcaactacaagccacgcagcaaatcccggagttacctaaagaggccgtcgagccaactatcagcactggccttgaggctatcggacgcgggcaggaccttgataagctggagcgctgcatcaacgcatggtcagcccttaaggcactcgaaggtgatgatgacctcaacttggctaacctcaagttgcgcatcgctaacgctatcggactcgacacagctggtatgcttctcactcaggaacagaaaaatgcccttatggcacagcaaggcgctcagattgctacacagcaaggggccgcagcgttgggtcaggggatggccgcacaggctactgcaagtcctgaagcgatggccgcagcggctgattcagtcggtatgcaaccgggcatgtaattagggcacactatagggagaccgattggtttccctcttagtcttaactttaaggagattgaaatggctggcgaatctaacgcagacgtatacgcatccttcggtgttaacagtgctgtattgactggtagcacacctgaggagcaccaagaaaacatgttggctctcgatgttgctgcccgtgatggcgatgatgcaatcgagctgaacacaaacagtgatgacccgtatggttccgatgtggacccgttcggtgaacctgaagagggccgtatgcaggtccgtatctccgctgacggttcagacgaacaggatggcgaagaaggttctgaagaagaacagcagggcgacgatgagagtcagtcggaggaagtaaccggagacgatggtgaacccgaagagttcaaaccgattggtgaaactccggctgacattaacgaagcctctcagcagctggaagaacacgaagctggctttaacgacatggttgctactgcaatcgaacgcggtctctcacaggatgctgtgacccgtattcagcaggagtaccagaacgaggacagcttgtccgatgagtcttaccgagagctggcagaggctggctacagtaaggcgttcgtcgatgcatacattcgtggtcaggaagctcttgtcaaccagtacgtagagaaagtgatggacttcgttggaggccgtgagcgcttccagcaggtctacagccacatgcagaccaataaccctgagggtgccgaggcgctcatcaaggcttttgagtctcgtgacgtagccaccatgaagacgattctgaacctagcgggacagtctcgtgataaaacctttggtaagaaagctgagcgctctattgccaagcgtgcaaccccagcgaaacctgtggcccgcaaggctgaaggcttcgagtctcaagctgagatgattaaggcgatgtccgacccgcgctaccgcaccgactctaagtatcgtcgtgaggtggaacagaaggttatcgactctaagttttaattagggcccactatagggagagagacagatagttcctctcggtctgaccgatgtcttggtctgtcctcccgcttcgagttacacaatgagtatcacctcatttcaagtagtacctcaaaacatttcgtataaacaacataaggagattcaacatggctaacatgcaaggtggacagcagctcggtactaaccaaggtaaaggtcaatccgcagcagacaagctggcgctattcctgaaagtattcggcggtgaagtccttaccgcattcgctcgtacctctgtgaccaccaaccgtcacatgcagcgtcaaatcagctccggtaagtccgcacagttccctgtgattggtcgcaccaaggctgcttacctgcaaccgggcgagtctctggatgacaaacgtaaagacatcaagcacactgagaagaccattaacattgatggcctgctgaccgctgacgtgctgatttacgacatcgaagacgcgatgaaccactatgacgtgcgctccgagtacacctctcagattggtgaatctctggcgatggcagctgatggtgcggttctggctgagctggctggtctggttaacctcaccgattccgtcaacgagaacatcgctggtctgggcaaaccgtccctgctggaagttggcgctaaggctgacctgaccgacccggttaaactgggccaagcggttatcgcacagctgaccatcgctcgtgcagctctgaccaagaactacgtcccggctaacgaccgtacgttctacaccaccccggacgtgtactctgcgattctggcggctctgatgcctaacgctgcgaactatgcggctctgattgaccctgagcgtggttctatccgtaacgtgatgggcttcgaagtcgttgaggttccgcacctgaccgctggtggtgctggtgatgaccgccctgatgaaggcgcagaagcgaccaaccagaagcacgccttcccggcaactggtggtaaagtcaacaaagagaacgttgtgggcctgttccagcaccgttccgctgtcggtaccgttaagctgaaagatctggctctggagcgtgctcgccgcgctgaatatcaggctgaccagattatcgctaagtacgcgatgggtcacggtggtctgcgtccagaatctgctggtgcactggttttcacagtagcctaagcgtaaatacctttagtgctcggacggtaactccgtctgagtatgaggtacagactgtgaccattgctggtgattcacttaaggtgacacttgatgggctggagggagtaacggactggtcaacccttgaggtaacttatggtacttccgggattgccagccacactcgccggaccaacacgctgtacttcaaaggaatcgctgtaggcgaaactatagtgactgtcagctttgacgggtctgaaatgaagtcctttaagctggtcgtgactaactaataagccaaaccccttggggaccactcacggtctctgaggggttttttcgttaggagcttacattatgaacatgcaagatgcttactttgggtctgccgctgagctggatgctgtcaacgagatgctcgcagctatcggtgaatccccagtgacaacccttgacgaagatggtagtgcagacgtagcgaacgctcgtcgtatcctcaacaggattaaccgccagattcagtctaagggttgggccttcaacatcaatgagtcggccacgctgaccccggatgccagcactgggcttatcccattccgtccggcctacctgtccatcctaggtggccagtacgttaaccgtggtggctgggtgtacgataagtccacagggacagacaccttctctggggcaatcacagtgaccctaatcacacttcaggattacgacgagatgcctgagtgtttccgccagtggattgtcaccaaggccagccgtcagttcaactctcggttctttggcgcagaggacgtagagaactcgctggcacaggaagagatggaagcccgtatggcgtgcaacgagtacgagatggacttcggccagtacaacatgctggacggtgacgcatacgtacaaggtctcatcagtcgttaatcagaaacctaaggaggaccaaatggctctcgtatcacaatcaatcaagaacctcaagggaggcattagccaacagcctgaaatcctacggtacccagagcagggtacacttcaggtcaacggttggtcctccgagactgagggcctccagaagcgaccacctatggtattcatcaaatccttgggaggccgtgggtaccttggggaggacccatacattcacctaatcaaccgcgatgaatacgagcagtattacgctgtgttcacggggaatgacgtaagggtgttcgacctgtccggctatgagtatcaggtcagaggcgaccgctcatacgtgaccgtcaacaaccctaaggacaacttgaggatggtcaccgtggccgactacacgttcatcgtgaatcgcaccagacaggttcgggagagtcagaacttgaccaacggtgggaccttcagggataacgtggacgccctcattaatgttcgcggtgggcagtatgggcgtaagctcgaagtgaacattaacggcgtgtgggttagccaccagctccctccgggtgataacgctaaggatgacccgcctaaggtggacgctcaggctattgctgaggctctagcgacccttctcagaacggcacaccctacgtggacgttcaacgtgggaacagggttcatccattgtatagcaccagcaggtactaccattgacatcttggagacaaaggatggctatgcggaccagctgattaacccagtgactcattacgtccagagcttctctaagttgccactgaacgccccagatggttacatggtgaagattgtcggggacacatccaagaccgccgaccagtattacgttaagtacgacaagagtcagaaggtctggaaggaaactgtaggttggaacatctcggtcggccttgagtaccacacgatgccttggacactggttcgtgcagctgacggtaactttgacctgagctaccacgagtggaaggaccgccgagctggtgacgacgacactaaccctcagccatcctttgttaactcgacgataaccgatgtgttcttcttcaggaaccgcttagggttcatctctggggagaacattgtgatgtcccgtaccagcaaatacttcgagttctacccgccgtcagtagccaactacacggacgatgacccgctggacgtggccgtgagccataaccgagtgtcggtccttaagtacgctgtgagcttcgcagaggagctgttgctgtggtctgacgaggcacagttcgttctgtcagccaacggtgtgttatccgctaagactgcacagcttgacctgaccactcagttcgatgtgtcagaccgtgctcgtccttacggtatcggcaggaacatctactatgcgtctcctcgcagctcctttacgtccatcatgcgctactacgcggtacaggatgtaagctctgtgaagaacgcagaggacatgacggcccacgtcccgaactacatcccgaacggcgtgtacagcatcaacgggtccggtactgagaacttcgcgtgtgtgctgaccaaaggtgctcccagcaaggtgttcatctacaagttcctctacatggatgagaacatccgccagcagtcatggtcccactgggacttcggagatggtgcggaggtgatggctgccaactgcatcaactcaacgatgtacatgctgatgcggaacgcctacaacgtgtggatagctgctgtggactttaagaaggagtcgactgacttcccgttcgagccttaccgattccacgtggacgccaagcggtcttaccacatctcagagacagcgtacgacatcgagaccaaccaaacggtagtgaacgtcaaggacatctacagcgcgtcgttctccaaaggcactgtggcaatctgcgagagtgatggtaaaatcaccgagtatgagcctatgggcgactcttgggattcgaccccagacatccgcattagcggtgacgtctctggtaaggatatcgtcattgggttcctgtatgacttccagtatgtgttcagtcggttcctcatcaagcaggagcagaacgatggcacaacgtccactgaggactctggtcgtctacagctacgtagagcgtgggtgaactatcagaacaccggagcgttcactgtgagcgtcgagaatggcaaccgtgagttcaactatctggtcaacgccagagtaggctctacaggtctgcgtctgggacagaaggccacgactactggtcagtatcgtttcccggtgacaggtaacgcactgtatcagaaggtgtccctgagttccttcaatgcttccccggtgtcaatcattgggtgtggctgggagggtaactacagcagacgtgccaacggcatttaactgaaggaatccttatggtgtgctcaattagggcacactatagggagaccacactaagaggggacttaaagcatgtacataagaaacactgtaagtaatgacttcgagttattcatcccggcctaccatgacgtacttgaggcacaggccatgggtatagaaccatcgttcccagcggttactgagtgtgtcacgttagaccacgatggctttcctctggctataggtggacactgcggagaccagtgctggttcgtcacgagtgatcaagtgtggagactcgacagggctggtaagctggagttccgcgagagaatcatggagtacagggacatgttattagatgtctatccatccctgtggaactttgtgtgggtcggtaatggtcctcacaagcgcttccttaagtccatcggtgcggtattccacgaggagtacacccaggatggtaagtttcaactgttcaccataactaggaggtaactatgtgctggatggcagcaataccaatcgcaatggcagcggcgcagtctataggtaacgctcggaatgccgctaatgccactgggttacagaacgaccagatgcgtcgacagtctgcacaaatgattaaagagtcaaacattcagaacgctaacgccagccttgagcagaaacagaagctcgaagaggcaagcgccgagttatccgctaagaatctcgacaaggttcaggccatgggtacaatccgtgcagccatcggagagggcaaccttgagggagctagtatggaccgcatccagcgaatcgaagagagcaagttcatccgggaagccaatgcggtcaccgataactaccgccgagactacgcgtcactcttcgctcagcagcttggtaactctgagtctactatggaccaagtgaaggccatgcagaaagctgaaggtaaaggtaagtctaagctggagcaggtactagacccgctggctattatgggttcacaggcagcgtcctcatatgcttccggtgcgttcgatagcaagggcaccaaggcgccaattagtcaggcccaaggaactaaggtaggaggtaaataatggccagtaaattagaacaagcactaagccaactgccacaggccgggtctacccgtatccgtggtggtgcagcgtccatgcagtatcgcccagtgactatccaacaggaaggagcccgacagtctaacctagtgcaatccttagcgaagttcgggacagttatgggcgaggcttatgatgcttacgacaagcgtcagcgcgataaggccgaggagcggtcagatgagattatccgtaagttaacccctgaacaacgtcgagaggcaatcaagaacgggaccctactgtatcaggatgacccgtacgctatggaggccctacggttcaagacaggccgtaacgctgcgttcctcattgacgacgaagtggcgcagaaggttcagaacggtgagttccgcactcgtaccgagatggaagagtatcgccacaagcggttgaccgaaggtgccaacgagttcgctgaacagttcatgattaaccctgaggactctgagttccagagagggttcaacgcgaacatcactgagcgcaacatctcgctgtacggtaagcacgatacgttcctgagcgagcaagcccagaagggtgccatattggcctcgaaggttgagctgtcaggcgtgcttaaagacccagccgttctggctcgcccagagtccggtgagttcttccaacgctacattgacaattcacttaagacaggtagtatccctagcgacgctcaggcacagcaggtaatcatcgggtcacttaacgacgtcattcagcgtccgggtgctaccaacttcttgcagagccttgagggccgtccggtcacccttaatgggaagaccacgacctataaggagctgatgggagaggagcagtggaacgccctgatggtcaaggcccagtcgactcagttcgacaatgacgctaagttgtccgaaggtttccgccttgggattaccagcgcgttgaaccaagatgacaccagcaagggctgggagatgcttcagggtgccaaagcggaacttgaccgcctgcaacccggtgagcagatgaccccagagcgtgagcgtcttattctggccgaggagcagatgcaggcccgtttccgtcaggaggcccaagcgaaagccaaggagatggacaagcgtcagaagaccatcaacaagaatcaggtcatcgaccagcagttcaccaagcgcatcaacggtcagtacgtgtccaccagctacaaggacatgccgaccaacgagaacactggtgagttcactcacagtgacatggtgaactacgccaacggtaagctggctgagattgaccagatgcagctcacggaacaacagaaggaccgcatgaaactgagctacctacgggcagactcagagggtggagccttccgtaccgttgtgggccagatggtaaccgacgctgggtctgaatggtctgccgctgtgattaacggaaagttaccagaagacaccacggcgttgaacaaactgcgcaccatgcgtaacaccgacccggacctcttcgctgcactgtacccggacaaggctgacttgttcctgacgatggacatgatggacaagcagggcattgacccgcagattctcatagacgctgaccgttctcgccgcagtctcaccaaagagatgcagtacgaggatgataaagcgtgggcgtccctgaagaacaactcagagtccccagagctgtcccgcattccagctagtctggacggtatggcccgtaagatttacgacagcgtcaagtaccggacaggtaacagcgacatggcaatgcagcagaccgataagttcctcaaggaatccactgtgaccttcaaaggtgatgacgtggatggtgataccattggtattatcccgaagaacatcctacaggtcagtgatgacccacgcagctgggagcagggccgagacatcctcgaagaagcccgtaagggaatcatcgcggctaacccttgggtgaccaacaagcagctgacgatgtaccagcagggcgactctatctacatgatggacaccactggtacagtccgaatccgctacgacaaggagctactgactcgcacctatcaggaacagcagcagcgactggccaaggaagccgaagagaaggcactgaaggaagcaaccaagcgtgcacctatctccgcagccactcaggcccgtaaggccgctggtgagcgtgtccgtgcgaaacgtaaagccactccgaagttcatctatggaggtggtgaccaataaccattaaggagacaacatgagctacgataagtccaaacctagcgattacgatggcattttccagaaggcagcagactctcatggggtctcctatgacctcctgcgtaagttatcgtttaacgaatcatccttcaaccctaaggccgtctctaagactggccctaagggcatcatgcagttcacccgcaacacggcccgctcgatgggccttaacgtgacagacggtgacgacgatgggcgctacaacccagagttagccattgacgctggcgctaaactgcttgcaagtctcgtcaagaagtacaacggggatgagctgaaagctgccctagcgtacaaccaaggggaaggcccagcgggcgcacctcagcttcaggcttacgataagggcgacttcgggtctatctccgaggaaggccgtaactacatgcggaagctgctggatgtggccaagagtccaaactcaggcgcactggaggctttcggtggtatcaccccaaagggtaaagggattcccgcagaggatgccttcaagggcatcgctaagtctgggaaggttggtaccgaactgccggagtcccatgggttcgacattgagggtgtagcgcaggaagtaccaaacactccatacgctaaggacttctgggagaagaccgggacgactctcgacgagtataactctcggtcaaccttcttcgggttcggggacgctgctgaggctcagattcagaactccacattaggtgtagctttccgtgctgcgcgggctgacgatgggtacgatgtgttcaaggacacgatgaccccgactcgctggaactcttatgttccctccaaggaagacctacagaagctgcgcgactctgggctacctccgagctactacggtgtggtgactggtggtgacggggagaactgggatgcactcatcaagctggccaaggataacttcgaggctgaccaacgggccgctgaggctggtactggtgcgaaactcgctgctggtatcgttggtgctggtgtagacccgctcagctatgtacctctggtcggtgtggccgggaagggactcaaggtggtcaataaggccctgcgagtaggtgcacaggctggagcactcagtgttgcctctgaaggaatccgcacgtcagtagctggcggcgaagctcactacgctgatgcagcacttggcgggttactgttcggtgctggtatgtcggccctcagtgacgctgtggctactggtatccgtaaggcccgtggcgttgagtctgtgaatgagttcgctgggccagcactccgtatggaagccagagagactgccatcaacactggtggtcacgacacctcgacactacctccagagaacttcgcgttcgagcaggaccacagaggtgttccgtttgccaaccacccgaacgaagagggcgcagtggttctggccaatggttccatcctgagcgataccaacccgcttaacccgaggactcaacgtgacttcgcagagattgacccagagcgtgcagctcccggtatcaagctcggtgggttcactgagattggcctgaagaccttaggttccaaggatgctggtgtacgcgcaatcgctcaggacctcgtgcgctctcctacagggatgcaatcagggtctagtggtaagttcggtgcgaccgcttcggacatccatgagcgactccatgcgactgaccaacggatgtataaccaactgtatgacgctgttgaccgtgccatgaaggacccagagttctccgtgggtgagcagaagatgtcacgtagagctatccgtcaggaagtctacaagcgtgccgccttggcgattgagcgtccagagttacaggctgatttgaccaaaggtgaacgtgaggtgatggacctgctgaaagagcacttcgacaccaagcgtgaactgatggaacagccgggtatcttcggtaacgccaacgccgtgagtatcttccccggtagtcgacacaagggtacctacgttcccaacgtgtacgacaggggcgctaaggagttgatgattcagaagctgggtggacctgaaggactccaacaggcaatcgctcagagctggcttaccagttaccgagtgagacctgaagtcaaggcacgtgtcgacgagtacctgatggaactcaacggctacaagtcggttgaccaagtgacacctgaggtggtccagaagcacgctatggataaggcgtacggtatcagccacacagaggacttcacagcatccagtgtcattgatgacaacatcacaggtctggtcggcatcgagaacaactcgttccttgaggcccgtaacatgttcgacagcgacctcccagttaccttgccagatgggtcaacattcagcgtcaacgacctgagggacttcgacatggcacggattatcccagcgtacgaccgtcgagttaacggcgatatctccatcatgggcggtagcggtaagaccacgcagcagctcaaggacgaaatcatggcgttagacaagcgggccgaacgtaagggacaactgaagggcgaagtggaagctctgaaggacaccgttaagattctcactggacgtgctcgccgcaacaacgatacggcctttgagaccgctatgcgcaccctgaacgacctagcgttcttcgctaagaacttctacatgggtcctcagaacctcacagagattgctgggatgttggctaagggtaacgttaaggcgatgctccacggtatcccaacgttgcgtgacctagccaccagaacctctccggtgtccggtagtgaactccgagaactccatggggcgctgttcggtaaggaactcgaccagttaatccgtccgggacgtgaggacatcgtacagcgaatccgtgaggcttccgataccagtggagccatggcgtcagtcattggtaccattaagttcggtactcaggagctgtcagctcgttctccttggaccaagatgctgaacggtacggctaactacattctggacactgcccgtcaaggtgtgctcggcgatgtggctggtgcggccctaggcggtaagggttccaagtttggtaaagagaacttcctcaaagctgcctctatcagtcctgagcagtggaagggaatcaagcaactctttgtcgaccacgcgactcgtgacgctaacggccagttcaccatcaaggacaagaaggctttcagtcaggacccgagagcgatggacctgtggcgtcttgccgataaagtttccgacgagaccatgctgcgacctcacaaggtatcccagcaggattccaaggcgtatggtgctggtgtcaagatggctatgcagttcaagaacttcaccatcaagtcactcaacgccaagttcattcggtccttctacgagggctacaagaacaaccgcgctatcgacatggcgttgacccacgtgttgtctctgggtatcgctgggacttactttgcgatgcaggcccatgtgaaagcttacggcctccaagagtctcaacgtaaggactacctgaagaaagccctgaaccctaccatgctgggctacgcagcgttgactcgaagttcccacactggtgccccgctgtccatcgtttcgatgatggctggtgccgctgggttccaagacgccaacatgctgcgctccaccatcttacctaaggaggaacagttccagaagaaagacggagcgtccaaaggtcgggctgagtcgagcaaccttgctggcaacttagggtctcaggtcccggctctgggttacgtagggaacgtcattgcgaccgccaagaacgcctatggtgttgctacagcacccaacaagccgactgagcgtgactacatgactggcctgatgaactccaccaaggagcttgtacccaacgacccgctcacccagcagctcatcatgaaaatctatgaggctaacggggtcaccatcaagcaacagccgaagcctaactaattaggacacactatagggagaccgattggtttcccttctcattcaactaaaggaggtcacaatggaccaagacattaaaacagtcattcagtacccagtaggggccactgagttcgacatcccgttcgactacctgtcccgtaagtttgtccgtgtgtcgctggtgtcagacgacaaccgcagactgctgagtaacatcactgagtaccgctacgtgtctaagaccagagtgaagctccttgtggaaactaccgggttcgaccgtgtggaaatccgcaggttcacctcagcgtcagagcgtgtggtcgacttcagcgatggttctgtgcttcgtgcagtggacctgaatgtttcacaactccagtctgcacacattgcggaagaagcgcgtgatgcagcacttctggctatgccggaggatgacgctgggaacctcgacgctcgaaaccgtaagattgtcagactggctcccggtgagattggctcagacgctgtcaataaggaccagttggacacaactctaggcgaggctggagggtaccttgcagacatgaaggagctcgataagattatccgggacttcatcgaaaacttcgccaatgacccagcatctttgcgtggggtagtgtgggtgtataacgcagggtcggctattggtggagagacttcggtcgtaatcactaagccgggagatgttctagctgttccctgcctgtatatcaacggctctcgtcaagatgtcggagtcacgtatgattatgataaccggaccaagaccatcacattcaagggtacccgtaagttacaacagaacgacttgctgattgccataacagctgaaggttcaatcccgcttgccgacatcctcatgagcctagacggtgctaagtatgttatgacctcgcagggtgttagcgtagaggctgctattcgcggcatccgaggtaacgttaagtctcttctggacctgtatcaagcggaggatggtgatgattactccccggcagcgacaagagctttgactcaaggcaacgcgctgtacatcccagttggtcgttggacattcaaatccaccgtacagattccagcggggaccacaatcttcgggtctggcgataagtcaatcattgcgtctccggaggcttcagatgcggctggtagcgcactagttaccgtgctgcgggcagacaacgttggttacatcactctgaaggacttaaaggtagacggcgggtccggctctgcccacaccgttaagaagaacgttcgcggtgttcgattctataagtgtaacaacatccgagtcgacggggtcgaagtgtctcgaacagcagactgggcgacctcctttgagcagtgcaccgaggtttacgttgatggctacaagcatcgccgctctgagagtccgcttcatggtggtcgagacggtctccacttcttggactgtaacgggttcatggcgaccaatctggatattgagtctcacgacgactgtgtcggtattacctctgagacgcttggtacgtttgacggccacgttgatggtgttcgcggtacatccacacttggctcactcgtgatttacaatgaggagacttctggtggcgtgtacattccgatgcctatgcgtggccttcggattgacaatgtgttccctaaagagggtcagtcggttcgccagctggttcgtgttgctgcctatgcgtcggcctcagatgctcgtgatgtaatcatctcgaacgttcagggtaacgttacggcgtctcacggtgttcaggtgcagaacgtaaagaacgtgttcttagacaatgtggatgcacacgtggtgtcctcaagttctcacggcgtgtatatcagtggttgtgacgttgtccgtggtaacgtgagtggaaccacctcagcgtctacacacgatggcgtccaagtgttcaactctaagaacgtcgagttggatattacctctcgcgcaagtgccgggaacgctgcccagattaatggttgtaccaacgtccgtgttgttccactcttctcttctgctggggcggcaggtctccgtatcgccgggtcaaccaatgtggacgtcccgtcagggacctttagtggtacgttccccggactctgtatcaaccaaactggtaacaccaacttgttcatcgctgcgactatcttgtatgacacagagtctggtcgagtcaacagtccggtggcctccatgtttatggatatccctgcggttatcatttcggccaaggaagcatctgacggcacccttactgtctatcgagcaatcggcgggacaatcacgagacttgccactggtcgctatcagatcgcgttcactaacccgatgcagacagctcagttcacttttacaatgacagccgcccatccgggtagcgtacgtcaggcgtacacagcttccgccattggtacagaaggtcttacgctgggtgttaaggactctgcgggtactgacacacactctgagtatattcgcttcattgcctacaactactaaggagactttatggatttcttcactcaaccgaaaggttcaacaattggtgtgctcagggatgggcgcactatccaacaggctatcgacgagattgaggaggttaagacccgcaacgttgaccctgagcgcttccgcgagacgttgacatcaagcgacgatgatgtatttgataagctgttcgagtggttagcctctcagtcagacgttgttggaacatcgagctcctcctacataacagccttaccgcgcatgattgatcttaacggtcgtacatacacattgtctaggaggcacgtactggacggaaacttcggcattcagaacggcaccatcctgatgtcaggtgagggtgagattatcatggggctagacgctggtactaagactcggcggcacttccttaagtatgtacatttcgagtacatcggggaatccgaccgaagtacctctctggtcaccatggcacgatgcttcaactctgtggtgttattctgtaacttcattgctggtggcgataccgctcgcaacagagcacctcgtacccgttatggcctgttcgcagggtccaccagatgctggggcttccagttaatcggtggtgagtattatggtggcgactgtgcgttgcgtgttggacgcgctaacgaccacactgggttgaccattcgtcccggtacagttcaccactctcgtgttatcaacatgctgctgtgtaacccggcaggtgccgaagtgtctggctgtaacattgaacacgcagacaacggtgcgattggcttagggattacctcaggtaccaacacctccggtaacgcagcccacggtgttcgtatcaacggtgtgtacttctacaacaacggtaacggctctagcggctccaacgttgctccagccaacatcctcatcgggaaggacattccggggactgagggttgggaccgtgaaggtcttccgattacctccagtaagaacactgcgcacagtattacggtatctgagtgctacatcgttagcccgaacacccagaacgcttggcaggtgaacgccctgtacagtgtgtccttcttggataacaaagtgggactcaaaggtgacgctacgattcacggtgtgtacgacggtacgtgtgctaactgctgggctgtaggtaaccgagaccaaggcggaaaggtgttccagttctcctctacagcaaccaacacgattctgactacccgcaaaggtaagtggactccgaagattatcggtgagggcacggcaggtaacactacactgagtgcttctggcggtgcgtactctctggataatggaatggtaaccgtatcgtgcttcgcggtggtagacactaaggaccctaacatggctgggaacctgaacatcaaactcccggtagcctgtgaggaccagcagcgaggcggtaacggaatctctctgactaacatccccggcgtatcgagtcctaacgggagtgttataatcattggggataccgctcgaatcatgctagggtctgcgagattgcagcccgagaacatcacaactggcactgctatccacttctcagtgtcataccccgccgatgttaaggtataaggaggtaacatgttatccctagacttcaacaacgaagttatcaaggcggctcccattgcgggggtcgctggggctgacggtgtagcgagactcttctggggtctctcactcaacgagtggttctacgtcgcggcaatcgcctacacagtggttcagattggtgccaaggtagtcgacaaaatcattgactggaagaaagctaataaggagtaacctatggacctgattaagttcctcgaaatgttagacactgagatggcccagcagatgctcatggacctgaaggaccctgaacgtcgaagccctcagctgtacaacgccattggtaaactgctggagcgccacaagttccaaatctctaagctgacacctgacgttaacatcttgggtggtctggctgagggacttgaggcttacaactccaaggtgggagctgatggtctgacagacgacgataagttcaccctacagtgatatactcaaggtactactatatgtagtgcctttatggatgtcattgcactacgctaggcgttcctacgtgaaatatgagaaacaacgggaggcattatgctggagttcacaaagagaatcgtcccgtatcttgtggctatcatggtgtttgccttcgggtggcacttgggttcccaatctacggacgctaaatggaaggaggtagtacagaatgagtacgttaagaagcaaacggctagagctgaaactcagaaagcgattgacgcagtatcggctaagtaccaagcagaccttgaggggctggaaggcagcactgataggattattgctgatttgcgtagcgacaataagcggctgcgcgtcagagtcaaacctaccagtgtcgccgcaggaccagacggtcgatgcctcgttgatggttccgtcgaactacacgaagcaactgctcgaagtcttatcgcaataacccagaaggccgacctcaaggagaaggccctacaggacacaatacgtaagctgcaagggaagggaggtgaacattgagtaactctcagcaagccaagaacgccttaatcattgcgcaactgaagggtgactttgtcgcctttctcttcgtgctctggaaggccctgaacctgccggaaccaaccaagtgtcaaatcgacatggccaagtgtctggcagacccaaagaacaagaagtttatccttcaggctttccgtggtatcgggaagtcgttcatcacgtgtgcgttcgtagtgtggaccctatggcgtgaccctcagttaaagatactgattgtctcggcctcaaaggaacgtgcggacgctaactccatcttcatcaagaacatcatcgacttgttgcctttcctgagtgagctcaagcctcgccccggtcagcgtgactctgtgattagcttcgatgtaggccctgccaagcctgaccacagcccgtcagttaagtctgtaggtattacgggtcagcttactggtagccgtgctgatatcatcattgcggatgacgtggagattccgggtaactctgcaacccaaggtgcccgtgagaaactctggacgttggttcaggagttcgccgcactgttgaaacctctgccgaccagtcgtgttatctatctgggtacccctcagaccgagatgacgctctacaaggaacttgaggacaaccgtgggtactccaccatcatttggcctgcgcagtatcctcgctccaaagaggaagacctgtactatggcgaccgtctggctcctatgctccgtagcgagtacgatgaggataaagagggcctcagcagtcagcctactgacccggttcgatttgactcaatggaccttcaggaacgtgaggtggaatacggcaaggctggctatacgctccagttcatgctcaaccctaaccttagtgatgccgagaagtaccccctacgcctccgtgacgctatcgtgtgcggtctacaggcggacaaggccccaatgcattaccagtggctcccgaaccgtcagaaccgcaatgaggagcttcccaacgtgggcatgaagggtgacgagatttactccttccatacagcctcaagcaacactggcgcgtatcagggtaaggttctggtcattgaccccagtggtcgcggtaaggatgagactggctggtgcgtactgtacaccctcaacggttacatctacttgatggacgctggtggtacccgaggttacgaagagaagtcccttgagttcctcgctaagaaggccaaacagtggcaggtgcagactgtggtcttcgagagcaacttcggtgacggtatgttcggtaacgtattccagcctgtgctcctgaagcatcacccagcgcaactcgaagagattcgtgctcgtggtatgaaagaggtccgtatctgcgatacccttgagcctgtactggcaagtcaccgcttggtcatccgtgatgaggtcatccgacaggactaccagacggcacgcgatgcagacggtaagcacgctctgaagtacagcctgttctaccagatgactcgtatgagccgtgagaagggcgctgtggcacacgacgaccgacttgatgcgttagcattgggtgtcgagttcctacgctctacgatgcagcaggacgctgtgaagatagaggctgaggtacttcaggagttcttggagcaccacatggagaagccgctgagtaacatctcccagttccgggccaccagtagcaacggtgtggacatccggtgggaagatgatggtgatgacactcagttcatccagtggtaatctatgcagtaaaagtgaatagggattcattaggccacggaaggccactttgaggaaactccatgtataacagacacttggaattagggcacactatagggagagacccttgaagacttactataagacaacttaaagattcattcatatagttattcactttaagtctccttacagatagagggtagtgatgataatatcaccctctcactataagacactaagagccaacataaggaggacctatgcgcttattgttaaccttactgcgccataggactacttggcgatttctgctggtacttgctggtgcccttggggcttcactggttactcagcagcaactcagtggactggagactctcgtgtgctctctactcacttgtagcgattagggtcttcctgacgcgctagggattccgtagtgatgcttatcagcatacaccactccatccctctacagtcaatacttaaagttaaccttaggtgattcactgggtctacctacgggtctatgcactgacctgaggaatacctgaggttacctttaagaatattgcataaagttctgagtgtacatctcacagtttacacttttggttatccccccggtaccctccagttcaccttcagtaaccataggccacccttaaccttcggtttaaccttaggtgggactggtgggaaaccttgggtgatactatatgttgtggtgagggtgacctgaggatactatatgttgatacctctgtgtccc

SEQ ID NO: 2 - DNA, 40644 bp, Unknown
  source: /note="Description of Unknown: KP3W-P0102 Bacteriophage sequence"
tatctgttggccctctttaagtaacaacctgaggtcatacctgaggtatccaccttaggacctcctgaggccatacctgagaccatataccttaggttaacggtgagtcatccggtgagtcatcactataaggctattgggtagtcattgtcaattcattctattaggacacactatagggagacacttaaagtattactaagagaccattaccaataagaacactatcactataggtctaactaaaagtttaactttaagtgttgacattcagaatccgttatgagacattagcaaccgttgagacagacacaacgctatcaaccactagcatacttcgagttactagctggatgccgaagggtctcaagtagtcatcaaccggacatacgaaaatggttgactcaacgatgaacaagtagtaacgtagtaagcaagcagtaaccagaagcaccgctctttaacaatatggattagtcaaagctgatatgttcaccatgacattagtgtttaactagtggttacattcgggtctctggcaaggtacgtcctgtcaccctgagagtagccacgatgataaccactaactgaaggatatacatcatgatttacaccaaagagccagccaacaaggtattcgtgttcgttaccgcttaccgtggtcatgagtcgctcgaagttaacgagaagatgctcaagggggcttgtgcgcaccattaagacctatccgggtgcatacggcaacattcgtgatgaacatgtacagggctgctttaaagaagctggtatgcctgaggcaacgcaagaacgtacgctcaaggttgattgcactgagaagcaagccgcagagttgacgtggctggcctgtaagacctactcgcaagatgctgtgctggtggtgaactcacagactcacacagccgcgctgtggtctatcgaggacgtaggtgagtacccacaggtctacccacgcttgaaagaggtgtccttaggcggtacgctgcaacaagtggatgcaccaagtggcgaatgctattcaatcatcgacggacaatattgggaggtggtgtaagatgaaactctacgctatccacatccaaggctggtgctatacaatgacatgctacggccacagcgagcgggacgcgaggtctcgcttcagggaccagcacggttttggtaaaaggcttcctaatgggactcgcgtgtgggaggttgtatgaaacactacggactcacacagcaggacatgcacgaataccgcagcgcctttaagacggcctgcgagtgcactgctggcatacctgaagcaaaagccgactggttcggctactacatggcccagctggctcaaacttatcgcacacgcaaggtaatgtatgctgaccctattcgtaattagtgtgtacgccctgattgtcctgtactttgtgcgggactttcgtaagggtctcaaggtacacaaagcatctttcagttacatgaagtggggcttcttgcctcgctttactgtacgtctacctaatggccgttttaaggctaacaaagtggggatattctatgtcgcaacgcactaacctgaagaaagccttcaagattgcacggatggtgatgccatacggtgccggggagaagcggacaaggagaatacttgcggtaagggctggaagattaccagctaggcaccgcaaatgggtaatgcagcaggtctacgtggagttgtatcaccctcagcggataccggatggctacatacggtcgcctataggctggaaacgagtagcaactaactaaaccactgacacgcaccacaaggaaacaacctaatgaactacaccgacatgcaagaacgcttagacgtcatccgtaacctgccaatctgtgaactcgacaagcgccagccactgctggtagcactcatcgctgacattgtgaactacgagacgtccgatggtgacgatacggacagcgattgtggccttgagcgtcaggactattggcaaaccctgaagattaaggccaaagacgctgggtttaacctgctgggcaacggtcacttcagcgcagcgtttaagcacgcactactgccgggcaaggtcattaaggttggctttaagaaagaggactcaggggccgcctacgtggctttctgccggatgcaccaaggccgggtagggatacctaacgtctatcacgtagcgcgtcacgctagctgctatacggtggtacttgatgagctggaaccatgccagcggcgagagaacgagacgcacgagcattacgcggacctagcgaattactttgtggagaactctggtgcagagctgggggatgttgacggtgcagagaaggaattaccattcatcgagacatgcaagatgattaacaagttcttccatggtatcgcatccttcgatatgcacagcggtaacatcatgttcaccaaagacggcaagccagtgattactgacccggtgtcattctcagcggaccgggaccgtgagcctttctcactggaacctgaggagctactcgtagagattgagcagatagcacacgccaagatgattgaacgctgtaagcgcaacaaggctaagcgagaccgtgacagcacgctgtgtcgcgcccgtagggacaacaacaaggcacgccgtaaggcctacaaggcacacgctaggtggcgtaaggagcgcgagcggattaacgctgaggccctaaagtatgaccttgcgaaaatcgagcagcgagtgcacgcatggatggcttgtgatggtctcgccatacagcagggtcgggtccttcaggtggacaactaccttcagggtagacttatgggttagcaaggtgtatcttaggtgtctccgatacgaggcaccaatagataaactttattcacaaagaggcacacaatgaacgcattaaacattgcacgtaatgacttctcagagattgaacttgccgctattccgtacaacatcctcagcgagcactatggggacaagttggcacgtgagcagctggcccttgagcacgaagcgtacgagctgggcgagcagcgtttcctgaagatgctggaacgtcaggtcaaagccggggagttcgctgacaacgtggccgctaagccgctggtcttaacgttgcacccacagctgaccaagcgtattgacgactggaaggaggagcaagcaaacgctcgcggtaagaagccccgcgcgtactacccgattaagcacggtgttccctctgagttggcccttagtatgggcgctgaggtgctcaaggagaagcgcggagtgtctagtgaggcaatcgcactgctaaccattaaggtagtcttagggacgctaacagacgcctctaaagccaccatccagcaggtatcctcacagttaggcaaggcccttgaggacgaggcccgcttcggccgtatccgtgagcaggaagccgcctacttcaagaagaacgtagcggaccagctggacaagcgcgtaggtcacgtgtacaagaaggcattcatgcaggtcgtcgaggccgatatgatttccaaagggatgcttggtggtgacaactggtccagctggaaaactgacgagcagatgcacgtagggaccaagctgctggagctgcttatcgaggggactggtctggtggaaatgaccaagaacaagatggctgatggctccgatgatgtgaccagtatgcagatggtccagctggctccggcctttgtggaactcctgagcaaacgagcgggcgcactcgcaggtatcagcccgatgcaccagccgtgcgtagtccctccgaaaccttgggtggaaaccgtaggaggtggctactggtcagtcggtcgccgtccgttggcactggtgcgcacccactccaagaaggcactacgtcgctacgatgacgtgcacatgcctgaggtatacaaagcggtcaacctcgcgcaaaacacaccgtggaaggtcaacaagaaggtgctggcggtagtcaacgagattatcaactggaagcactgcccggtaggtgacgtcccggcgattgaacgcgaagagttaccaccacgaccggatgatattgacaccaacgaggtggcacgtaaggcgtggcgcaaggaggccgcagctgtctaccgtaaggacaaggcccgacagtctcgccgtttgtcaatggagttcatggttgcacaggccaacaagttcgctaaccacaaggccatttggttcccgtacaacatggactggcgcgggcgtgtgtacgctgtgagcatgttcaacccgcagggtaacgacatgaccaagggtatgctgacactggccaagggcaagtcaatcggtctcgacgggttctactggctgaagattcacggtgcaaactgcgcaggcgtcgacaaggttcccttccctgagcgcatcaagttcatcgaagagaatgaaggtaacattctggcaagcgcagcggacccactgaataacacttggtggaccaagcaagattcaccgttctgtttcttagcgttctgctttgagtatgcgggcgttaagcatcacggcctgaattacaactgctcgctgccgctggcgttcgatgggtcctgctctgggattcagcacttcagcgcaatgctccgcgattccatcggtggccgtgccgtgaacctgctgccttctgataccgtgcaggatatctacaagattgtggccgacaaggttaacgaggtgctccaccagcatgcagtcaacgggtctcagacggtggtcgagcagattgctgacaaagagactggagagttccgcgagaaggtaacgctgggtgagtccgtactggctgcgcagtggctgcaatatggtgttacccgcaaggtgactaagcgttccgtcatgacgttggcgtatggttccaaagagtttggcttccgccagcaagttcttgaggacaccattcagccagctattgacaacggcgagggcctgatgtttacgcaccctaaccaagcggctggctacatggctaagctgatttgggacgctgtgaccgtgaccgtagtggccgctgtcgaggcgatgaactggctgaagtctgccgctaagctgctggctgctgaagtcaaggacaagaagaccaaagaggtactgcgtaagcgctgcgcaatccactgggtaacaccagatggcttcccggtgtggcaagagtaccgcaagcagaaccaagcgcgcctgaagctggtcttcctcggtcaggccaacgttaagatgacgtacaacactgggaaagactcagagattgatgcacacaagcaggaatccggcatcgctcccaactttgtacactcacaggatggtagccacctacgcatgaccgtagtgcacgccaacgaggtctacgggattgactccttcgcgctcattcacgactccttcgggaccattccggcagacgccgggaatctctttaaggcagtccgtgagacgatggtcaagacctacgaggacaacgatgttatcgctgatttctacgaccagttcgccgaccagctgcacgagtctcaactggacaagatgcctgcggtcccggccaaaggtggcctgaatctgcgcgatatcttagagtctgacttcgcgtttgcgtaaggtctcgggcaattagggcacactatagggaaccttcgaatgaccgagggttccattacttaaagtcttaacttaaagaatacttaaagaggcacgccatgacttactcactcgttgtaaccatcttgttaatcatcacccttacactcctcattaacgccatacgcaattcactacgcagcgaggagcgactggagcgcaaggtccgagagaccaactccgcgtttaacaatgagtcctgcaaggtcctgcgactggcagacaaagctgactcgctcagtagacaagttcgctacttagagggagagcttgagagcgagaaacagaaggtgcgcgatgtgaacgaactgctgagccaccagcgggaccgcatgaagttcctccgcaagtcgctgaaggaagcacaagacgagctgatgatggtctccgacctgattcacgttaagttcaccgcagtgttgccggatggcacccactctaagacgctctttaagttaggacttgggccgtgtggtctgcacgttaagtccctccgctggacagagctagatgaccgctatctgatagaccagctgtgcacaaacggtgagcgcaagcagttcgtctactacaagagcgaagtagtaggtcgcatcgagttccgccacggtaagatgtaattaggacccactatcaggaacatactcaaggtcatcacgtttggtggccttcatgaatgtcccttactatcacaatcaggagcaacaccatgtatcagaacacaatcaactttgagcgcacccgtgaacgtcagcagaccgagggttacatccctaagggccgcaagctgaacaagacgaagcgcggtggtggcgtgaagggttccttccgtaacgcgaagggtgacagcgttgttaaccaagagaaatacttcgtaggagcgtaacaaatggctgagcaaagtaagtatctattcgatggtagcacctcacagtggtctcgcttaggtcatgcagagcgtagactgctggacgagacgatgttaagggtggtcatggcgtaccacacgtggaaccatacagtctctctctcagtatacgcgccgcacccagacggtgacgagctgttagttgagaaatctttcagtcgctggtcgattgactcagcgtcagactggttggctaaactgaccgctgattattcaagctggaagtaattaggacacactataggcagactcaaggtcatcggaatccggtggcctttatgattgcttattgcacactaaatgaacactacacttcggagacatcatcatgatgaacattaagaccaacccctttaaggccgtttcattcgttcgctctgctatcgagaaggcgctggagacttccggttacctcatcgcagacactaagcacgatggtgtacgcgggaacatttgcgtagacaacacggccaacgcagcgtggctcagccgggtctccaagaccattccggcccttgagcacctcaacggtttcgaccagcgctggcagaagttactgaaagatgaccgctggattttcccggatggctttatgctggatggagaactcatggtcaaatgtgtggactttaacaccgggtctggcctactgcgcaccaagtggctcaagaagggaaacatgcagtttgacatcggtggtccatatgaacaatgggagcctgacatgaagggtcagcccttcgcactccacccgaatcacctcaaagttgtactctacgatatcattccgcttgacattatcgagtccggtgatgactacaacgtgatgaccctcctccgccttgagcacgtcaaggttgccttaccagtcctgcaagaccacttccctgaagtcgagtggtgcctctcagagtcccatgaagtttacgacatggatgaactcgatgcgctgtaccgacagaaacgcgaagaaggtcacgaaggtctcgtagttaaggaccctcagggcatctacaagcgcggtaagaagtccggctggtggaaactgaagccagagaatgaggctgacggtgtcgttgtgggactcaactggggaactcccggccttgctaacgagggcaaggtgattggcttcgaggttctccttgagtcaggtcgagtggtgtccgcaaacaacatctctcaggcacttatggatgagttcacgcgagccgtggaggccacagcagaccatcacgaaggttcctacactaacccttacgacggctgggcgtgtcaaatcaagtacatggaggaaactccagacggctctcttcgtcacccgtcgttcgacaaatggcgtggcaccgaagctgacccgaccatcaagatgtaattaggacccactataggagacaccaaatgtctatcaacctgattctaatcatcgtgttcatcctcgcggctatcgtgtggtcaatgaacgacgagccacctaaaggagcataaaccatgcgcttacacttcaacaaatccaacgatatcttctcggttcgccgggaggaccgcagcattgtagctgcctcggagcgacacggtaagattccacgtatcggcgacaccttcgagctggcacctagcgtgcacatcttggttactcgcggtctctacgaattggctcagtctaagagccgtcctttcgtacccgttgtggtaaccaagtggccacgccttcgcctgttctgggagcgcatcaaggaggtggtcaatgaataaggcggaaccatacatcaccctacacgcaagccactgtcgctcggtactatcatttggggcgtgtgactgcggtgctaagcctgcaccagttaaacgacagactgtagacgacggtgttaagcagccgagtcactaccaactgttcgaaggcgtcgaggccatcgaggtgattgcccgcagcatgacccaagagatgttcaaggggtactgcctcgggaacatcctcaagtaccgccttcgtgctggtaagaagtccgagctggctactttagagaaagacatggcgaaggccactttctatctggagctatacaccaagcacaagggtctgtgttatgacgcctagtgaatggtgccgagcgatgtacgagaagacgctcgaccctgcgtacatcaccctgtacaacatgtggaaggagcgagaagatgcaaaagttcgtcgtaacggtcgagacagctaacgcttcgtatgaactcccggtacacgctgggtctcttgaggaggccctcgaagttgccgaggcggagtatgaagagttaggccaagtgactcgggcacgcccggatagtcattaggacacactatagggacacaggttgtccctctttctgttataaaccaaaggagattcatcatggcattcgctaagaagaaaatttacaccactaagattggcacctgtgagccatacgcttacttcaacaagccggactatggcggtgagggttttgagaacccacgcggtacctacaagggttccgtaacgttcaagaacgaagactgtcaggacctcgtggacctcatcgttaagacccatgaggaaaactacgccgctcgtctggaagcgcacgaagcgaacccgccgaaggttcagaagggcaagaaacccctgaagccatacgaaggtgacatgccgttcttcgacaacggtgatggtaccaccacgttcaacttcaagtgctacggttcgtacgaggacaagaagactggcgagaccaagaagattgttctgggcgttgtcgacgctaagggcaagcgcattcaggacgttccgattatcggcggcggctccaaagtgaagattcgcttctcgctggtaccgtacggctggtctgcggtagctggcgcttccgttaagttgcagctggaaggcgtaatgctggtcgaactggctacctttggtggtggtgaagatgactgggctgacgaagccgtagaaggcggttacgaagcggacgaatctcgcagccgtaaacctcaggaagacccggaagactggtctggtgaggaagaggacgagggtgaagccgaagaagatgatgacttctaatggctggatatggagccaaagggattcggaaggtgggtgccttccggtctggccttgaggacaaggtgtccaagcagttagaatcaaagggcgtcacgttcgactacgaattgtggcgcatcccttacgttattcctgcgagtgaccacctttacactccagacttcttgttacccaacggtatcttcgtggagactaagggtctctgggaagccgaggaccgcaagaagcacctattgattcgtgagcaatacccggagttagacatccggttagtgttctcttcgagtcgcactaagatttacaaagggtcaccaaccagttacgctgagtggtgcgagaagcataacatcttgtttgccgacaaattgattcccgtagactggctgaaggagccgaagcgtgatgtaccgttcggcaagttcaagcagaagaaaggagcaaagtaagtatggccaaggttcaattcactaagcgcaaggagacctctcagattttcgttcactgttcggccaccaaggcaaccatgaacgtaggtgtccgtgagattcgccagtggcacaaagagcaaggttggcttgatgtgggataccatttcatcatccgtcgtgatggcaccgtagaggctggccgcgaccaagatgctgttggttcacacgtcaagggatacaactcgacttctgtcggtgtgtgtcttgttggtggtatcgacgccaagggtaaccctgaggcaaacttcacgccagcccagatgcagtctctgcgttcactgctggtagaactgaaggtgcaatactctggggccgttctgatggcacaccacgacgtagcacctaaagcctgcccgagcttcgacctgaagcgctggtgggagaagaacgaactggtcacttctgaccgtgggtaaacattagggcacactacagggagacaattacgtttccctgttgtcgcacattctgtacaaattatggtcaggcttcaggtgccactgacgtagcgctgcgtttcattcgggttcgattcccggactgaccacaccaacggagattactttatgaacactctcaaagatgtgttaacttctgtactgttgatagctgtaacagcgctggctgtactgtttacggtaatagttgtgatgggtacacttcaatgggtagcatccgtatgagttacggagacagtcaagaagacggtcaggagagtatcttcctgttccacgctccatgcgaaaactgtggttcttctgatggtaactcagtgtactctgacgggcatgagtattgcttcgtgtgtcaacaccgggttcccggctcagaggaacgtaccgaaaagttatcatcgagaagacccaaaggagggaattacgggatgaatacacaaggttcaggcttattggtattcggcgagaatgacggtcggtacactgacctgacggctcgttgtatctcaaaggcgacatgccagaaggctggctattgggtcgccaaggtcagagggaccgcctatcaggtggccgactatcgtgaccagaatggctccatcgtctcccagaagctgcgggacaaggagaagaacttctctaccagagggcgggacaaggagaagaacttctctaccagagggtctcacaaaggggatgcactgttcggtaagcacctatggaatggtggcaagaagattgtcataaccgagggcgaaatcgacatgttaaccgtgatgcaacttcaggactgtaagtggcctgtggtttctctcggtcacggtgcgtcagccgctaagaaaacttgtagtgcaaactacgagtatttcgatagcttcgaccagattatcctgatgttcgatatggatgagccgggtcgcgcagccgttgaggaagccgctcaggttctccctcccggtaaggtccacgtggccgtgctgaccgagaaggatgccaacgagtgtttactcaaaggcaagggcaaggaggttctcgaccagatatggaacgcagcaccttgggtgcccgatggtgtcatcggtgcgatgtccatgaaggaccgagtgcgagaggccatgaccagtgagcagagcgtcggataccttttctcgggatgtccgggactgaatgaccgaaccttgggtgcacgtggtggcgaagtcatcatggtcacttctgggtcaggaatgggtaagtctacgttcgttcgccaacaggccctagggttcgccagagggcaaggactgcgagttggtatggcgatgcttgaggagtccgtagaggagaccatggaggatgtcctagggattgctaacggcatccgcttacggcagcaacctcgggagttcaagcagaagctgatagaagacgggacgtacgacaaatggttcgatgagctgtacggcaccgaccagttccatctctacgactcctttgcggaagctgaggtggaccgcctgctggctaagctgcactacatgcgcacagggttaaactgtgacgtaatcattctggaccacatctcaatcgtagtgtcggcctcggaggaatccgatgagcgcaagatgattgaccgactcatgaccaagctgaaagggttcgctaagtcaaccggagtggtacttattgttatttgccacctgaagaacccggagaaaggtaaagctcatgaagaaggacgtgctgtttccattactgacctgcgtgggtctgggtctctgcgccagctctctgatactatcattgcacttgagcgtaatcagcaaggggatatgcctaatcttgtcctccttcgtattctcaagtgtcgctttaatggtattggcgttggcattgcagggtacatggagtacaacgaaaagaccggactccttgaaccgtctagctacactggcggagaaggagagggtgatactggctgggaaggacacgaagaagacgactactgagaagtgtcaatgcccagcgtgtgactgggcgtcaccatattgtaaccactgaaaggagaaccaccatgtttaaattaatcgagaagttaggccgtctggtcatcgcactgtacatccgtgaagccaaggcactggacaaagcgtccaaggtggaagcgaaagcagccgctaagctggctaaggcagccgacaaggcacgtcaggcatctctggatgcaaccgcagaggcagctaaagttgcagctaaagctcagaaacttaaggagttcttctaatgactaccaaagctaaattccccggcaacaccattcagctgtccgacactgtagaccagtggggccgcaaggttcacatcaacgtccgcaacgacaaggttactcttgtctaccgctggaaggctaagagcgataaccgtgcgcacactcagcgcatgacccttgacgatgtacaggctgctcgactgctggcatccgtagccgtagcagcgactgtggctgtgggtgaagacaaagttcgggaggcgctcctgacaaaagaggtcggcgaaacgtccttatgtctggccgcatcgtcagaagccaagtgataaactcaaggtcattactatatgtagtggcctttatgattatcatacacaacatattgaggagttacaccatgcgtaaacccgaagagattcgtaaagagattgaagcgctgaacaaagagctggctgaggccaagacctatgaggccaagcgtgacgctgctgttcacattctggagaaccttgggtggacccacagtggtcacaagggctggcagagacctaaggatggaccgaaagtatccgactacaaggccccactgaaggctggcgagctggcaacgtgggaggacggtaacattggtggaaccgtatatatccgtagcgtaggtaacaaattctctcaggtgtctcacgtccgtggccttagtcgtctgggtgttgacgtccttacgggcagcttcgccgttgagaacagtaagttaaccatccgtccgcgtgagtatttcctcgggcgtcgctaagtaacaggagaccactatgttagtaaccgatattgaggctaacaacctcttagagaaagtcactcagttccactgtggggtcatctatgactacagcacggacgagtacgcatcgtatcgaccttgggacttctcagcgtatctcgatgcgttagaagctgaggtggctcgtggtggtctcatcgtattccacaacggtcacaagtacgatgccccagtgttgaccaagctggccaagctccaattaaaccgagagttccacctgccgcgtgagaacgtagtggacacgttggtacttagccgtttgctttttgcgaacattaaggactccgacatggccctgctgcgttccggtaagttacccggcaagcgcttcgggtctcacgctctggaggcgtggggttaccgcttaggcgagatgaagggtgagtacaaggacgacttcaagaagctccttgaggaacagggtgaggattacgtggacggtgctgagtggattagctttaacgagccgatgatggactataacgttcaggacgttgtggtaaccaaggcgctcttagagaagctactgagtgacagtcactatttccctgaggatatcgaactgtatacccacagctactctatggaacatccgttctggacactctcctgcgaggccgtctggctggaacaccgagccgcttggttactcgctaagcaggagcgcaacggattcccgttcaacaccaaggccattgaggaactctacgttgaactcgcgggtcgtcgttctgaactccttcagacactcaccgacactttcggaacttggtatcaacctaagggcggcactgagttattcctgcacccgcgcaccgggaagcctctggggaaatacccacgagtgaagtacccgaagcagggtgccatctacaagaaacccaagaacaaagctcagcgtgagggccgtgaaccctgcgagctggacactcgggattacgtagagggcgctccgtacacaccagtagagcacgttgtgtttaacccaagtagccgagaccacatcgcgctcaaactgaaggaagccggatggatacctacagagttcaccgaaaagggtgcacccaaggtagacgacgaggtccttgagcatgttcgtgtggaagaccctgagaagcagcgatgtatcgacctcattaaagagtacctgatgatacagaagcgtatcggtcaggcggctgagggcgacaaggcgtggctacgttacgttcaagaggatggtaaaatccatggaagtgttaaccctaatggtgcagttacagggcgagcaacgcatagcttccctaaccttggtcaagttccgggcgttcgttcgccgtatggtgagccttgtcgagcagcgttcggcgctgagcatcacttggacggacttaccggacagccttgggttcaagcaggcatcgacgccagcggactcgaactccgttgtctggcacacttcatgtctaagtacgacgacggggcttatgcggatgtcattctcaacggtgatatccacacagtcaaccaaacggcggctgagttgccaacacgtgataacgccaagacattcatctacggtttcctctatggtgctggagacgaaaagattggacagattgtgggagcaggtaaggaacgcggaaaggagctcaagaagaaattccttgagaacaccccagcaatcgcagcgttgcgcgaaggaatccagcagaccctcgttgagtcatcccgatgggttgccggagagcagaaggtcaagtggaaacgacgctggattaagggactggatggaagaaaggtacacgtacggtcaccacatgccgcgctcaacacgttgcttcagtcagcgggtgcgctcatttgtaagctgtggattgtcgagactgaagagttgcttcttaaagcaggattgaagcacggatgggatggcgacttcgcctacatggcgtgggttcacgatgaaatacaagtggcctgccggaccccagagattgcacagcaggtgattgacatagcgcagcaggctatgcgtaacgttggagaccactttaagttccgttgccgtctggatacagaaggtaagatgggtcctaactgggccgtatgtcactaatagtacaggagatttatcatggctattaccaagcgtgtacatgtaagttttgatgctaagttggtactgtctaccgaagacgtcgagaagattgctaaagacctagtggtggcttccaagggtttccttgagggtaagccaacagatggtcgcaagctggctggtatcgaggctgctgtaactgatgggccggaggcagcaatcgagctggcactgaagggcatcataacccaagagcttaagtctttattgaacgagatgaagttcaactccttcggtaacttccgagtggggttcaagcaatgagcgagtacctaaaagttctggcggccctcaagggctgccctaagtccttccagtcgaactacgtgcgtaacaacgctgcgttagtcgcggaggctgcgagccgtggtcacatttcgtgtctgaccatgagtggtcgtaatggtggcgcttgggaaattaccagtgccggagtgaaattccttaagacccatggaggttgcttatgagcaagcacacattgttatccttcagcgactaccgggcaacccagaagattgccaagggtgtccttgtgatggatggtgactggctggtgttccaagccatgagcgccgctgagttcgatgcctcgtgggaggaggagatttggcaccgttgctgtgaccacgctaaggcccgcgagattctggagaactccattgaatcctacaagggccgcaagaaggcgtggaagaatgcagacgttgtcctagcgttcacagaccgtgtcaactggcgcaagctgctggtggacccaacgtacaaagagaaccgcgcagtcgtcaagaaacctgtgggttacttcgagttccttgagtctgtctttgagtcctacacgtgcatccttgagcctcagctcgaaggcgatgacgttatgggaatcatcgggtctaaccctctcgtatacaactacgagaaggccgtactggtctcctgtgacaaggactttaagaccataccggactgcgacttcctgtggtgtacgactggtaacatcctcgtgcagacgcaggagacagccgactactggcatctcttccagactatcaagggtgacatcaccgatggttacggtggcatccccggttggggcgataccgcagaggacttcctcaaggaacccttcattgtggagcctgtaacgtccgtgctgaagtccggcaagaacaagggccaagaggtaaccaagtgggtgaaacgcgctcctgagccgggagagacgctctgggactgcattaagtccattggtgccaaagcagggatgaccgaagcggaagtaatcaagcagggccagatggctcgcatcctccgttctgatgagtacaacatcgagacgggggagattactctatggcaaccgggcagctgattctcatcgtacttaccatgggcttagtcgcacgtggtctctggatgttggccttgattatcaagcagatagtcgagcataaagcagagtgataaactcatgggcacaattaggacccactatagggaagtgcccattatgattattacttaaagattacttaaagaggagactcaaatgttaaaacctatagagcacatccttaacaatcccaatgaccttcccgatgtaccgcgagctgtcaaggagtacctacagtctcgcttcaatgccgacttcctgtatcagtcagaggtccgtaagctacgtgaggctggccacagtgaggagttcatctccggcgtactgtatggtcactacatggcttctcgtgtccttgacgagatggagggccgtcagcgtgcactcaaagaaggagattgattatgtgtttctcacctaaaatgaaagcacctaaggttgacacaacgactgtccctgagccagctccgctcactgaggaacccaagggtatccagtacggtggcgacgaggactcaaacagcaccactcctgaggtgtcagggcgtaagtcactcaaggtgaccaagacgacagaacctacagggtccgtcagtaaaatccgtaagtcagctttaggaggctaacatgggactgttcaagaaaatcaagaaggctatctccaaggtagccaaggcaccactcaaggccgtcggtctagcagcagatgcacctaacgtgcagacagccgcagataccacagtggcagcgcctcaggaagcaccgaaagaggtcgtggaggacgttgaatcttcagcagacactgagtctggtaagaagaaatcccgagcgtctggcaagaagtccctctcagtttcccgcagctcaggcggtgggattaacctgtaaggaggtgacccgtggcagaagttaaactcgaaggcttcgcagaggagggagccaaggcggtatatgaccgtctgaagaacgaccgacaaccttacgagacacgagcagagtcctgtgcgcagtacacgattccctcactgttccctaaggactccgataacgcatcaaccgattacacgactccgtggcaatccgtaggtgctcgcggcctgaacaacctagcgtccaagctgatgctggccctgttcccgatgcagtcttggatgaagttgaccattagtgagtacgaagcgaagaaccttctgggtgacgctgagggtctcgctaaggtcgatgagggcctctcaatggtagagcgaatcatcatgaactacatcgagtccaacagttaccgagtgactctctttgagtgcttgaagcaactgtgtgtggctggtaacgcgctgctgtacttaccggagcctgagggttacacaccgatgaagctctatcgactgaactcatatgtggtccagcgagacgccttcggtaacgtactccagattgtcactctcgacaagattgcattcaacgctctccctgaggacgttcgcggccaagtggaagcagctcaaggtgagcagaaggaagacgctgagattgacgtctacacccacgtgtacctgaatgaagccggggatggctactcgaagtatgaagaggttgccgaagaggtagttccgggcagcgaggctgagtacccgctcgaagagtgtccgtacattccggtccgcatggtccgcatcgacggtgaatcctacggtcgttcctacgtggaagagtatctgggcgacctcaagtccctagagaacctccaagagtccatcgttaagatggcgatgattaccgctaaggttatcggtctggtagacccggcaggtatcactcaggtccgccgactaacggcagcacagtctggtgcgttcgtaccgggccgtaagcaggacattgagttcctccagctggagaagtccggtgactttaccgtagcgaagaacgtaagcgacaccattgaggctcgcctctcgtatgcctttatgctcaacagtgcggtacaacgtacaggtgagcgagtcacagctgaagagattcggtatgtggcgtcagagctggaagatacccttggcggtgtctactcgattctctcgcaggaactccagctgcctctggtaagagtgctcttgaagcaactacaagccacgcagcaaatcccggagttacctaaagaggccgtcgagccaactatcagcactggccttgaggctatcggacgtgggcaggaccttgacaagctggagcgctgtattaacgcatggtcggcccttaaggccctcgaaggtgatgatgacctcaacttggctaacctcaagttacgtatcgctaacgctatcggactcgacaccgctggtatgcttctcactcaggagcagaagaacgcccttatggcacagcagggtgctcagattgctacacagcaaggggccgcagcgttgggtcaagggatggccgcacaggctactgcaagtcctgaagcgatggccgcagcggctgattcagtcggtatgcaaccgggcatgtaattagggcacactatagggagacacatccagattgaatgaggtctggtcagaaggttcgagtccttcgtgtttccctcttagtcttaactttaaggagattgaaatggctggcgaatctaacgcagacgtatacgcatccttcggtgttaacagtgctgtactgactggtagtacacctgaggagcaccaagaaaacatgttggctcttgatgttgctgcccgtgatggcgatgatgcaatcgagctgaacaccaacagtgatgacccgtatggctccgatgtggacccgttcggtgaacctgaagagggccgtatgcaggtccgcatctccgctgacggttcagacgaacaggaaggcgaagagggtcagggcgacgaagaacagcagggcgacgaagagggtcagctggaggaagtaaccgacgatggtgaacctgaagagttcaaaccgattggtgaaactcctgctgacatcaacgaagcctctcagcagctggaagaacacgaagctggctttaacgacatggttgccactgcaatcgaacgcggtctctcacaggatgctgtgacccgtattcagcaggagtaccagaacgaagaccgcttgtccgaggagtcttacaaagagttggccgaagctggctacagtaaggcgttcgtcgatgcgtacattcgtggtcaggaagctctggtcaaccagtacgtagagaaagtgatggacttcgtgggaggccgtgagcgcttccagcaggtctacagccacatgcagaccaataaccctgagggtgccgaggcgctcatcaaggcttttgagtctcgtgacgtagccaccatgaagacgattctgaacctagcgggacagtctcgtgataaaacctttggtaagaaagctgagcgctctattgccaagcgtgcaaccccagcgaaacctgtggcccgcaaggctgaaggcttcgagtctcaagctgagatgattaaggcgatgtccgacccgcgctaccgcaccgactctaagtatcgtcgtgaggtggaacagaaggttatcgactctaagttttaattagggcccactatagggagagacagatagttcctctcggtctgaccgatgtcttggtctgtcctcccgcttcgagttacacaatgagtatcacctcgtttcaagtagtacctcaaaacatttcgtataaacaacataaggagattcaacatggataacatgcaaggtggacagcagctcggtactaaccaaggtaaaggtcaatccgcagcagacaagctggcgctattcctgaaagtattcggcggtgaagtcctgaccgcattcgctcgtacctctgtgaccactaaccgtcacatgcagcgtcaaatcagctccggtaagtccgcacagttccctgtgattggtcgcaccaaggctgcttacctgcaaccgggcgagtctctggatgacaaacgtaaagacatcaagcacaccgagaagaccattaacattgatggcctgctgaccgctgacgtgctgatttacgacatcgaagacgcgatgaaccactatgacgtgcgctccgagtacacctctcagattggtgaatctctggcgatggcggctgatggtgcggttctggctgagctggctggtctggttaacctcgctgattccgtcaacgagaacatcgctggtctgggcaaaccgtccctgctggaagttggcgctaaggctgacctgaccgacccggttaaactgggccaagcggttatcgcacagctgaccattgctcgtgcagctctgaccaagaactacgtcccggctaacgaccgtacgttctacaccaccccggacgtgtactctgcgattctggcggctctgatgcctaacgctgcgaactatgcggctctgattgaccctgagcgtggttctatccgtaacgtgatgggcttcgaagtcgttgaggttccgcacctgaccgctggtggtgctggtgatgaccgccctgacgaaggcgcagaagcgaccaaccagaagcacgctttcccggcaactggtggtaaagtcaacaaagagaacgttgtgggcctgttccagcatcgttccgctgttggtaccgtcaagctgaaagacctcgctctggaacgtgctcgccgcgctgagtatcaggctgaccagattatcgctaagtacgcgatgggtcacggtggtcttcgtccagagtctgcgggtgcgctggttttcacggcggcctaagcgtaaatacctttagtgctcgggtggtaactccacctgagtacgaggtacagactgtggctattgctggtgattcacttaaggtgacacttgatgggctggaaggagtgacggactggtcaagccttgaggtaacctatggtacttcagggattgccagccacactcgccgtaccaacacgctgtacttcaaaggaatcgctgtaggcgaaactctagtgactgtcagctttgacgggtctgaaatgaagtcctttaagctggtcgtgactaactaataagccaaaccccttggggaccactcacggtctctgaggggttttttcgttaggagcttacaatatgaacatgcaagatgcttactttgggtctgccgctgagctggatgctgtcaacgagatgcttgcagctatcggtgaatcccccgtgaccacccttgacgaagatggtagcgcagacgtagcgaacgcccgtcgaatcctcaacaggattaaccgccagattcagtccaaaggttgggccttcaacatcaacgagtcggccacattgacccctgataccagcactgggcttatcccgttccgtccggcctacctgtctatccttggtggccagtacgtgaaccgtggtggttgggtgtatgacaagtccacagggacagataccttctctggggcaatcacagtgaccctgattactcttcaggattacgatgagatgccagagtgtttccgccagtggattgtcaccaaggccagccgtcagttcaactctcggttcttcggagcggaggacgtagagaactcgctggcacaggaagagatggaagcacggatggcgtgcaacgagtacgagatggacttcgggcagtacaacatgcttgacggtgacgcatacgtacaaggtctcatcagtcgttaatcagaaacctaaggaggaccaaatggctctcgtatcacaatcaatcaagaacctcaagggaggcattagccagcagcctgaaatcctacggtaccccgagcagggttcacttcaggttaacggttggtcctccgagactgagggtctccagaagcgaccacctatggtgttcatcaagtccttgggaggccgtggatatcttggtgaggacccctacattcacctcatcaaccgtgacgaatatgagcagtattacgcggtgttcactgggaatgacgttcgggtgttcgacctgtccggctatgagtatcaggtccgtggcgaccgctcttacgtgaccgtcaataaccctaaggataacttgcggatggtcacagtggctgactacacgttcatcgtgaatcgtaccagacaggtccgagaaagtcagaacttgaccaacggtgggaccttcaaggataacgtggacggtatcattaacgtccgtggtggccagtatggccgtaagctggaagtgaacattaacggcgtctgggtaagccaccagctacctccgggtgacaacgctaaggatgacccacccaaggttgacgcacaggccatcgctgaggccctagctgttcttcttcgcacggctcaccctacgtggacgttcgatgttggaacagggttcatccactgtatcgccccagcgggtaccactctggatgtgttcgaaacgaaggatggttacgcagaccagctaatcaatccagtaacccattacgtccagagcttctctaagttgccgctgaacgccccagatggttacatggtgaagattgttggggacacatccaagaccgccgaccagtattacgttaagtacgacaagagtcagaaggtctggaaggaaactgtaggttggaacatctcagtcggccttgagcaccacacgatgccttggacactggttcgtgcagctgacggtaactttgacctgagctaccacgagtggaaggaccgtcgagctggtgacgatgatacaaaccctcagccatcctttgtgaactcgacgataactgacgtgttcttcttcaggaaccgcttagggttcatctctggagagaacattgtgatgtcccgtaccagtaaatactttgagttctacccgccgtctgtggccaactacacggatgatgacccgctggatgttgctgtgagccataaccgagtgtcggtccttaagtacgctgttagcttcgctgaggagctgctgctgtggtccgatgaggcgcagttcatcctgtcagcaaacggagtgttatccgctaagacagcccagctggacctgaccactcagtttgatgtgtctgacagagcgcgcccttatggtatcggtaggaatatctactatgcagcacctcgcagctccttcacgtccatcatgcggtactacgcggtacaggatgtgagctctgtgaagaacgcagaggacatgacggcccacgtcccgaactacattccgaacggtgtgtacagcatcaacgggtctggtacggagaactttgcgtgtgtgttgaccaagggcgctcccagtaaggtattcatctacaagttcctctacatggatgaggacattcggcagcagtcgtggtcccactgggacttcggggagggtgttgaggtgatggctgcaaactgcatcaactctacgatgtacatgctgatgcgtaatggatacaacgtgtggattgctgctgtggacttcaagaaggagtcgactgacttcccgttcgagccttacaggttccacgtggacgccaagcggtcttaccacatctcagagacagcgtacgacgttgaaacgaaccagacggtagtgaacgtcaaggacatctacagcgcgtcgttctctaatggcactgtggcaatctgcgagagtgacggtaaaatcaccacgtatgagccgatgggtgactcttgggattcaaccccagacatccgcattagcggtgacatctcgggcaaggatatcgtcattgggttcctgtacgacttccaatatgtattcagtcggttcctcatcaagcaggagcagaacgatggtacaacgtccacagaggacgccggacgcctacagctgcgtagagcgtgggtgaactatcaggacactggcgcgttcactgtgagtgtcgagaatggcaaccgtgagttcaactatctggtcaacgccagagttggttccactggtctacgtctgggccagaaggccacaactactggtcaataccgattcccggtgaccggcaacgccttgtaccagaaggtgtccctgagttccttcaatgcttccccggtgtcaatcattgggtgtggctgggagggtaactacatgagacgtgccaacggtatttaactgaaggaatccttatggtgtgctcaattagggcacactatagggaggccacactaagaggggacttaaagcatgtacattagaaacactgtaagtaatgacttcgagttattcatcccggcctaccatgacgtacttgaggcacaggccatgggtatagaaccatcgttcccagcggttactgagtgtgtcacgttagaccacgatggttttcctttggctataggtggacattgtggagaccaatgctggttcgtcacgagtgaccaagtgtggagactcgacagggctggcaagctggagttccgtgagagaatcatggagtacagggacatgttattagatgtctatccatccctgtggaactttgtgtgggtcggtaatggtcctcacaagcgcttccttaagtccatcggtgcggtattccatgaggagtacactcaggatggcaagtttcaactgttcaccataactaggaggtaactatgtgctggatggcagcaataccgattgcaatagcagcggcgcagtctgtaggcaacgctcggaatgccgctaaggccactgggttacagaacgaccagatgcgccgacagtctgcccagatgattaaagagtcaaacattcagaacgctaacgccagccttgagcagaaacagaagctcgaagaggcaagcgctgagttatccgctaagaatctcgataaggttcaggccatgggtacaatccgtgcagccatcggagagggtaaccttgagggagctagtatggaccgcatccagcgaatcgaagagggcaagttcatccgggaagccaatgcggtcaccgataactaccgccgagactatgcgtcactcttcgctcaacagcttggcaactctgagtccactatggaccaagtgaaggccatgcagaaggctgaaggtaaaggtaagtctaagctggagcaggtactagacccgctggccattatgggttcacaggcagcgtcctcgtatgcttccggtgcgttcgacagtaagtccaccaaggccccaataagtcaggcccaaggtaccaaggtaggaggtaagtaatggctagtaaattagaacaagcattgagccaaatgccacaggccgggtctactcgtatccgtggtggtgcagcgtccatgcagtatcgcccagtgactatccaacaggaaggagcccgacagtctaacctagtgcaatccttagcgaagttcgggacagctatgggtgaggcgtacgatgcatacgacaagcgccagcgcgataaggccgatgagcggtccgatgagattatccgcaagttgaccccagagcagcgccgggaggcaatcaagaacgggaccctgctgtatcaggatgacccgtacgccatggaggccctgcggttcaagacaggccgtaacgctgcgttcctcattgacgacgaagtggcgcagaaggttcagaacggtgagttccgcactcgtaccgagatggaagagtatcgccacaagcggttgaccgaaggtgccaacgagttcgctgaacagttcatgattaaccctgaggactctgagttccagagagggttcaacgcgaacatcactgagcgcaatatctcgctgtacggtaagcacgatacgttcctgagcgagcaagcccagaagggtgccatattggcctcgaaggttgagctgtcaggcgtgcttaaagacccagccgttctggctcgcccagagtccggtgagttcttccaacgctacattgacaattcgcttaagacaggtagtatccctagcgacgctcaggcccagcaggtcatcatcgggtcccttaacgacgtcattcagcgtccgggtgctaccaacttcttgcagagccttgagggccgtccggtcacccttaacgggaagaccacgacctataaggaactgatgggtgaggagcaatggaacgccctgatggtcaaggcccagtcgactcagttcgacaatgacgctaagttgtctgaaggtttccgcctcgggattaccagcgcgttgaaccaagacgacaccagcaagggctgggagatgcttcagggtgccaaagcggaacttgaccgtctacagcccggtgagcagatgaccccagagcgtgagcgtttgattcaggctgaggagcaaatgcaggcccgtttccgtcaggaggcccaagcgaaagccaaggagatggacaagcggcagaagaccatcaacaagaatcaggtaatcgaccagcagtttaccaagcgtatcaacggtcagtatgtgtccaccagctacaaggatatgccgaccaacgagaacaccggagagttcactcacagtgacatggtgaactacgctaacggtaagctggctgagattgaccagatgcagctcacggagcaacagaaggaccgcatgaagctgagctacctccgggcagactcagagggtggagccttccgtaccgttgtgggccagatggtaaccgacgctgggtctgaatggtctgccgctgtgattaacggtaagttaccagaggataccacagcgttgaacaaactgcgcaccatgcgtaacaccgacccggacctcttcgctgcactgtacccggacaaggctgacttgttcctgacgatggacatgatggacaagcagggcattgacccgcagattctcatagacgctgaccgttctcgccgcagtctcaccaaagagatgcagtacgaggatgataaagcgtgggcgtccctgaagaacaactcagagtccccagagctgtctcgcattccagctagtctggacggtatggcccgtaagatttacgacagcgtcaagtaccggacaggtaacagcgacatggcaatgcagcagaccgataagttcctcaaggaatccactgtgactttcaaaggtgacgacgtggacggtgataccattggtattatcccgaagaacatcctacaggtcagtgatgacccacgcagctgggagcagggccgggacatcctcgaagaagcccgtaagggaatcatcgcggctaacccttgggtgaccaacaagcagctgacgatgtaccagcagggtgactctatctacatgatggacaccactggcactgtccgcatccgctacgacaaggagctactgactcgaacctatcaggaacagcagcagcgactggccaaggaagccgaagataaggcacttaaggaagcaaccaaacgtgcacctatctccgcagccactcaggcccgtaaggcagctggtgagcgcgtccgtgcgaaacgtaaagccactccgaagttcatctatggaggtggcgatgagtaaacaataaggagacaacatgagctacgataagtccaaacccagcgactacgatggtatcttccagaaggcagcagactcccacggtgttagctatgacctcctgcgtaagttatcgttcaatgaatcatccttcaaccctaaggccgtctctaagactggccctaagggcatcatgcagttcacccgcaacacggcccgagctatgggccttaacgtgaccgatggtgacgatgatgggcgctacaaccctgagttagccattgacgcaggcgctaagctacttgcgagtctcgttaagaagtacaacggggatgagcttaaagcggccctagcgtacaaccaaggggaaggcccagcaggagcaccccagcttcaggcttatgataagggcgacttcgggtccatctcggaggaaggtcgcaactacatgcgcaagctgcttgacgtagccaagagtcctcagtctggtgctcttgaagcgttcggtggcatcaccccaaagggtaaagggattcccgcagaggatgccttcaagggtatcgctaagactggcaaagttggtactgagctgccggagtcccacgggttcgacattgagggtgtagcgcaggaagcaccaaacactccatacgctaaggacttctgggagaagaccgggactactctcgatgagtataactctcggtccaccttctttggcttcgggaatgctgcgagtgcagaactccagaactcgaccttaggtgtagctttccgtgctgcgcgggctgacgatgggtacgatgtgttcaaggacacgatgaccccgactcgctggaactcttatgttccctccaaggaagacctacagaagctgcgcgactctgggctacctccgagttactacggtgtggtgactggtggtgacggcgagaactgggatgcgctcatcaagctggccaaggataacttcgaggctgaccaacgggccgccgaggctggtactggtgcgaaactcgctgctggtatcgttggtgctggtgtggacccgctcagctatgttcctctggtcggtgtggccgggaagggactcaaggtggtcaataaggccctgcgagtaggcgcacaggctggggcacttagcgttgcctctgagggaatccgtacgtcagtagctggcggtgaagctcactacgctgatgctgcacttggcgggttactgttcggtgctggtatgtcggctctcagtgacgctgtggctgctggtatccgtaaggcccgtggcgttgagtctgtgaatgagttcgctgggccagcactccgtatggaagcacgagagactgccatcaacactggcggtcacgacacctcgacactacctccagagaacttctcgttcgagcaggaccacagaggtgttccgtttgctgaccacccgaacgaagagggcgcagtggttcttgccaatggttccatcctgagcgataccaacccgcttaacccaaggactcaacgtgacttcgcagagattgacccagagcgtgcagctcccggtatcaagctcggtgggttcactgagattggcctgaagaccttagggtccaaggatgctggtgttcgtgcaatagctcaggacctcgtgcgctctcccacaggtatgcaatcagggtctagtggtaagttcggtgcgaccgcttcggacattcatgagcggctccatgcgactgaccagcggatgtataaccagctgtatgacgctgttgaccgtgccatgaaggacccagagttctccgtgggtgagcagaagatgtcgcgtagagctatccgtcaggaagtctacaagcgtgcggccttggcgattgagcgtccagagttacaggctgatttgaccaaaggtgaacgtgaggtgatggacctgctgaaagagcacttcgacaccaagcgtgagctgatggaacagccgggtatcttcggtaacgctaacgccgtgagcatcttccccggtagtcgacacaagggtacctacgttcctaacgtgtacgacaggggtgctaaggaactgatgatgcagaagctgggcggacctgaaggactccaacaggcaatcgctcagagctggcttaccagttaccgagtgcgacctgaggtcaaggcacgtgtcgacgagtacctgatggaactcaacggctacaagtcggttgaccaagtgacacctgaggtggtccagaagcacgccatggacaaggcgtacggtatcagccacacagaggacttcacggcatctagtgtcattgatgacaacatcacaggtctagtcggtatcgagaacaactcgttccttgaggcccgtaacatgttcgacagcgacctcccggttaccttaccggatgggtcaacattcagcgtcaacgacctgagggacttcgacatggcacggattatcccggcgtacgaccgtcgagttaacggtgatatctccatcatgggcggtagtggcaagaccacgcagcagctcaaggacgaaatcatggcgttagacaagcgggccgaacgtaagggacaactgaagggtgaagtggaagcactgaaggacaccgttaagattctcactggacgtgctcgtcgtaacaacgatacagcctttgagaccgccatgcgtaccctgaatgacctagcgttcttcgctaagaacttctacatgggtccgcagaacctcacagagattgctgggatgttggctaagggtaacgttaaggcgatgctccacggtatcccgacgttgcgtgacctagccaccagaacctctccggtgtcaggtagtgaactccgtgaactccatggggcattgttcggtaaggaacttgaccagttaatccgtccgggacgtgaggacatcgtgcagcgaatccgtgaggcttccgataccagtggggccatggcgtcagtcattggtaccatcaagttcggtactcaggagctgtcggctcgttctccttggaccaagatgctgaacggtacggctaactacattctggacactgcccgtcagggtgtgctaggtgatgtggctggtgcggccctaggcggtaagggttccaagtttggcaaagagaacttcctcaaagctgcctctatcagtcctgagcagtggaagggaatcaagcaactctttgtcgaccacgcgactcgtgacgctaacggtcagttcaccatcaaggacaagaaggctttcgctcaggacccaagagcgatggacctgtggcgtcttgccgataaggttgccgatgagaccatgctgcgccctcacaaggtatcccagcaggattccaaggcgtacggtgcgggtgtcaagatggctatgcagttcaagaacttcaccatcaagtcactcaacgccaagttcattcggtccttctacgagggctacaagaacaaccgcgctatcgacatggcgttgacccacgtgttgtctctgggtatcgccgggacctactttgcgatgcaggctcatgtgaaggcttacggcctccaagagtctcagcgtaaggactacctgaagaaagccctgaacccgaccatgctgagctacgcagcgttgactcgaagttcccacactggtgccccgctgtctatcctttcgatgatggctggtgccgctgggtatcaggatgccaacatgctgcgctctacaatcttaccgaaggaggaacagttccagaagaaagacaaggcagcacagggtcgtaccgaggcgtctgactttgcgggtaacttaggttctcaggttccagcactgggttacatcgggaacgttgtggctaccgctaagaatgcttatggtgttgctacagcgcccaataagccgactgagcgtgactacatgactggcctgatgaactccactaaggagcttgtacccaacgacccactcacccagcagctcgtgatgaaaatctacgaagccaacggtgtgaccatcaagcagcagccaaagcctaactaattaggacacactatagggagaccgattggtttcccttctcattcaacttaaggaggtcacgatggaccaagaaattaaaacagtcatccagtatcctacagggtccactgagtttgacatcccgttcgactacctgtcccgtaagtttgtccgcgtatcactggtgtctgacgacaaccgcagactgctgagtaacataaccgagtaccgatacgtgtctaagaccagagttaaactgctggtagcaaccactggtttcgaccgtgtggagattcgacggttcacatcggcgtcagagcgagtggtagacttcagtgacggttctgtattacgagccaacgaccttaatgtctcgcagctacagtctgcacatatcgctgaagaagcccgtgatgctgcactgctggcaatgccggaggatgacgctggtaatctcgacgcccgtaaccgtaagattgttagactggctcccggcgaggatggaacagatgcaattaataagaatcagctcgacacaactctgggtgaagctggtggtattctgtcggatgtgcttactgctcagaaagagttctatgagtatctaactaatttcgctacggacaccgctatggtgcgtggagtgagctgggtgtacaaccaagggtctgcggttggtggcgagactatcatcacaattgataagacagagcgtgtatacgcggtcccattcattgaggtgaatggtagtcgtcaagaggtcggatatcactttgagttcgacgcgctgctccagagaatcaccttagcgaaaccactggttgctggtgacttcctgatggcaatgaccactgagagtaacatcccgttagaggacatgctggcctcagctgctggtgcttctaacattgggacatcgtctggtgagactgttcagaagattctggacggtgtaactcagctgattccttcagtggacgatttggaagctgtaggtaaggccaatggtcgccgggtgcgcaccgtgggttattacaccgggactaacgctggtggcggtctgtacacgtacaatgagtctcgtaagaatgagaacgacggtgtgacagttattaacggctgggtacgttcgtttgacaacgtccgctatgtaagtgatgctggtattgttgctgggatggcacccactgaggttgcacgccgactgaacatcctactgtccactgcaaagcgtggctgcacgtttgatggtgagggaatcccgctgactacctcaacccacattcggttactcaatacggacaacgttgaagtgcgggcgatgcgcatcactggggacaaggccacatggaccttcgttaataacgaccgtggtgtattccttgcgaatacctgtcattaccttgagattcacgggtgtgagttcgtaggagtccgtatgtcgcagccaaataccccaatcacctctaccatcacggctacaggtcgtattcaggatggtgacgctgggattgagctgaagacctgtaacgactccaatgtgcaccacaactacgttcgcggcgttaagacttggggcatcctgagcactaacggtacccgtccgacagttcgtaagaacctcgtggttagctgtgcgcgtcagtcaggtgtctctgtgtcaatcggtaccacatttgacgtggacgatgggactgttgcggataaccgaatctaccttgtgggcctgtatggtatcgaggtcgagaagtggaccaagcaatgtaaccgcctgagcgtctacggcaacgttgtgtccgaggcacagtatggtatccacgctgtcgggcttatccgtggcatgaacgcattcgataaccgcattggtggatgtcgctacgcaatggcagggaccagcctcaacgcatcactgggttcagagatgaacgcgcggaacttcttcaagtccaacgtgtgtattagtaactatgcaggcattgccccgtcgaactccttctatgtgacctacgcgaacaacctcgtaaacggatggcgcgatacggactacttcgtcaatgacccttacgacaccgtagagattgtggcctcagctaactctttctactcactgcgtaatctggatgttgacaagaagctgctcattaacgggaccgagtgtactgtgcagtcaagcaccgcgagtacagaccctgcgattgtcgctaagattggtctgtccacagtgtacctcattgtgtgcgataagctgccagcaggtctggaggatttcactccattcaagactcaggtgaccgccactacctcttacggttactggccgttctatcagaagaacacgggcgaccacctcattgataatacctttgagaacgtccgctatggcttctaccagacagctcaggctaccgagaataacgactgctgggccactggtaccaagttcgttaacgtgtcggtacctgtagctggtggggcgtggggtatcgaggtgagcaagtccaccttcatcaactgtcagcgctataccgacagtgccaacaaggtgaccttgaaccagctgggcctgtccgctctggctaccgtgggccatcctactgcggtcactgggtcggaaactaagcctactgtgacgttctacaactttgctaatgacatcgtggtacgcttccgtctgcgtgcttccaacgtatcgtggacaacagaagcctccagtatcaaccttgcgattaaccttaacggttcttccgtaggttacattcaggttacctctaagggtgccagcgtggatgggttcgttgacctgctgaacggtggacttctgcctaagggtgccaataccttacgtgttattgataccactggttccctgtcgtttgataactggtacattgagatgttcgttgcaagctaacttaaggagatttgcatgttaaacaatctgaatcagccgaaaggctcaaccattggtgtgctcagggatgggcgcaccgtccaagaggctattgacgagcttgagaagattaagactcgcaatgtagaccctgagcgtttccgtgagacgttgacgtcaagcgacgatgaggtatttgataagctgttcgagtggttagccactcagtcagacgttgttggtacagctagttcctcctatatcatagccctaccgcgcatgattgaccttaacggtcgtacctacacactgactaagcgtcacgtattggatggtaacttcggtattcagaacggtactatcctgatgtccggtgagggtgagattatcatgggcctcgacgcaggtactaagactcgccgtcacttccttaagtatgtacatttcgagtacatcggggaatccgaccgaagcacctctctggtaaccatggcacgatgcttcaactctgtggtgctattctgtaacttcattgctggtggtgataccgctcgcaacagagcgccgcgcacccgttacggcctgttcgcagggtccaccagatgctggggcttccagttaatcggtggtgagtattatggcggtgactgtgcgttgcgtgttggacgcgctaacgaccacactgggctgaccattcgtcccggtacagttcaccactctcgtgttatcaacatgctactgtgtaacccggcaggtgcagaggtgtctggctgtaacattgaacacgcagacaacggtgcggttggtttagggattacctcaggtacaaacacctcaggtaacgcagcccatggtgttcgcatcaatggtgtgtacttctacaataacggtaacggctccagtggctcaaacgtagcacctgcgaatatcctcattggtaaggacattccgggaaccgaaggttgggacagaccgggcgagttgattacgtcaagtcgaaacacagcgcacagcattacggtatcagagtgctacatcgttagtccgaacacccagaacgcttggcaggttaacgccctgtacagtgtgtccttcttggataacaaagtgggactcaaaggtgacgctacgattcacggtgtgtacgacggtacgtgtgctaactgctgggctgtaggcaaccgagaccaaggcggcaaggtgttccagttctcctctacagcaaccaacacgattctgactacccgcaaaggtaagtggactccgaagattatcggtgagggcacggcaggtaacactacactgagtgcttctggcggtgcgtactctctggataatggaatggtaaccgtatcgtgcttcgcggtggtaggtactaaggaccctaacatggctgggaacctgaacatcaaactcccagtagcctgtgaggaccagcagcgaggtggtaacggaatttctctgactaacatccccgacgtatcgagtcctaacgggagtgttataatcattggggataccgctcgaatcatgctagggtctgcgaggttgcagcccgagaacatcacaactggcactgctatccacttctcagtgtcataccccgccgatgttaaggtataaggaggtatcatgttatccctagacttcaacaacgaagttatcaaggcggctcccattgcgggggtcgctggggccgatggcgtagcgaggctcttctggggtctctcactcaatgagtggttctacgtcgcggcaatcgcctacacagtggttcagattggtgccaaggtagtcgacaaaatcattgactggaagaaagctaataaggagtaacctatggacctgattaagttcctcgaaatgttagacactgagatggcccagcagatgctcatggacctgaaggaccctgaacgtcgaagccctcagctgtacaacgccattggtaaactgctggagcgccacaagttccaaatctctaagctgacccctgacgtcaacatcttgggcggactggctgagggtctggaggcttacaactccaaggtgggcgctgatggtctgacagacgacgataagttcaccctacagtgatatactcaaggtactactatatgtagtgcctttatggatgtcattgcactacgctaggcgttcctacgtgaaatctgagaaacaacgggaggcattatgctggagttcacaaagagaatcgtcccgtatcttgtggctatcatggtgtttgccttcgggtggcacttggggtcacaatctacggacgctaaatggaaggaggtagtacagaatgaatacgttaagaagcaaacggctagagctgaaactcagaaagcgattgacgcagtatcggctaagtaccaagcagaccttgaggggctggagggcagcactgataggattattgctgatttgcgtagcgacaataagcggctgcgcgttaaagtcaaacctaccagtgtccccgcaggaccagacggtcgatgcctcgttgatggttccgtcgaactacacgaagcaactgctcgaagtcttatcgcaataacccagaaggccgaccttaaagagaaggccctacaggatacaattcgtaagctgcaagggaaaggaggtgaacattgagcaactctcagcaagccaagaacgccttaatcattgcgcaactgaagggtgactttgtcgcctttctcttcgtgctctggaaggccctgaacctgccggaaccaaccaagtgtcaaatagacatggccaagtgtctggcgaacccaaagaacaagaagtttatccttcaggctttccgtggtatcgggaagtcgttcatcacgtgtgcgttcgtagtgtggaccctgtggcgtgaccctcagttaaagatactgattgtctcagcctcaaaggaacgtgcggacgctaactccatcttcatcaagaacatcatcgacttgttgcctttcctgagtgagcttaagcctcgccccggtcagcgtgactccgtgattagctttgatgtaggccctgccaagccggaccacagcccgtcagttaagtctgtgggcattacgggtcagcttactggtagccgtgccgatatcatcattgcggatgacgtggagattccaggtaactctgcaacacaaggtgcccgtgagaaactctggacgttggttcaggagttcgccgcactgttgaaacctctaccgactagccgtgttatctatctgggcacacctcagaccgagatgactctctacaaggaacttgaggacaaccgtgggtactccaccattatctggcctgcacagtatcctcgctccaaagaggaagacctgtactatggtgaccgactggctcctatgctccgcagtgagtacgatgaggacaaagagggtctcagcagtcaaccaactgacccggtgcgattcgactccatggaccttcaggaacgtgaggtggaatacggcaaggctggctatacgcttcagttcatgctcaacccgaacctcagtgacgccgagaagtacccgctacgcctccgtgacgctatcgtgtgcggtctacagatggacaaggccccaatgcactaccagtggctgccgaaccgtcagaaccgcaatgaggagcttcctaacgtgggtatgaagggtgacgagatttactccttccatacagcctccagtaacactggtgcgtatcagggtaagattctggtcattgaccccagtggtcgcggtaaggatgagactggctggtgcgtgctgtacaccctcaacggttacatctacctgatggacgctggtggtactcgtggttacgaagagaagtcccttgagttcctcgctaagaaagccaaacagtggcaggtgcagactgtggtctttgagagcaacttcggtgacggtatgttcggtaacgtgttccagcctgtgctcctgaagcatcacccagcgcaactcgaagagattcgtgctcgtggcatgaaagaggtccgtatctgcgatacccttgagcctgtactggcaagtcaccgcttggtcatccgcgatgaggttatccgacaggactaccagacggcacgtgatgcagacggtaagcacgctctgaagtacagcctgttctaccagatgacccgtatgagccgtgagaagggcgctgtggcacacgatgaccgacttgatgcgttagcattgggtgtcgagttcctacgctctacgatgcagcaggacgctgtgaagatagaggctgaggtacttcaggagttcttggagcaccacatggagaagcccctaagtaacatctcccagttccgggccaccagtagcaacggtgtggacatccgatgggaagacgagggggatgacactatgttcatcgcatggtgattatgcagggattgtgcataaggattcattaggccacggaaggccacttaatgaaaacttcaggtataacagacacttggaattagggcccactatagggagagacccttgaagacttactataagactacttaaagtttcattcatatagttatgcacttaaagtctccttacagatagagggtagtgatgataatatcaccctctcaccataagacactaagagccaacataaggaggacctatgcgcttattgttaaccttactgcgccataggactacttggcgatttctgcttgtacttgctggtgcccttggggctacactggttactcagcagcaactcagtggactggagactctcgtgtgctctctactcacttgtagcgattagggtcttcctgacgcgctagggattccgtagtgatgcttatcagcatacaccactccatccctctacagtcaatacttaaagttaaccttatgtaccgcccttgggtctacctacggtaagcaccgtacctgaggaagtacctgaggttacctttaagaattttacacaaagttctgagtggatatctcacagtttaaactttcagtactccccccggtggccctccagtcaccttcagttcaccttgggtaccctcctttaaccttaggattaccttgggtggtaccttgggttgacctgagggatactatatgttgtggtgtgggacaccttaggacactatatgttgatgtctctgtgtccc

SEQ ID NO: 3 - DNA, 40738 bp, Unknown
  source: /note="Description of Unknown: KP3W-P0103 Bacteriophage sequence"
tatctgttggccctctttaagtaacaacctgaggtcatacctgaggtatccaccttaggacctcctgaggccatacctgagaccatataccttaggttaacggtgagtcatccggtgagtcatccggtgagtcatcactataaggctattgggtagtcattgtcaatagaccatcaacacattcaattaggacacactatagggagacacttagagtattactaagaggagaaacgaatggctaataactatatacataaagagataaaccttaagacacttaaagacaatggctatgaggtgactacagagggtcaagtgataagccataaagggagagcaccacgtgtcttgaagtcgcctgtgggttctcatggctaccgtgtggtaaacctgaggttagacggtaagtcgtccatgttctgcgtccataggttggtagcctatagttacctaacgattgatgaggataggccgctggtcaatcataaggatggcgacaagaccaataacactctgaataacttagagtttgttacgcacagtgaaaatatatcacattattatcaaaataagtgttgactctgaatcacagctaggacatactgcaatcactccagcgacggaggctgacttagagcagtaacctctaaggttcattaacaatatggattagtcaaagctgatatgttcaccatgacattagtgtttaactagtggttacattcgggtctctggcaaggtacgtcctgtcaccctgagagtagccacgatgataaccactaactgaaggatatacacatcatgatttacaccaaagagccagctaacaaggtatttgtattcgtcaccgcttaccgtggccatgagtcgctcgaagttaacgagaagatgctcaagggtctcgtacgcaccattaatacctatccgggtgcatacggcaacattcgtgatgaacatgtacagggctgctttaaagaagctggtatgtctgaggcaacgcaagagcgcacgcttaaggtagaatgcactgagaagcaggccgcagagctgacgtggctggcttgtaagacctactcgcaagatgctgtgctggtggtgaactcacagacccatacagccgcgctatggtctatcgaggatgtaggcgagtacccacaggtctacccacgcttgaaagaggtgtccttaggcggtacgctgcaacaagtggatgcaccgaagggtgaatgctactcggtcatcaacgggaaatactgggaggttgtgtaagatgaaacgctacgctatccgcattaaaggttggtgccacactatgacctgctacggctacaacgagagagacgcacggtctcgcttcagggaccagcacggttttggtaaaaggcttcctaatgggactcgcgtgtgggaggttgtatgaaacactacggactcacacagcaggacatgcacgaataccgcagcgcctttaagacggcctgcgagtgcactgctggcatacctgaagcaaaagccgactggttcggctactacatggcccagctggctcaaacttatcgcacacgcaaggtaatgtatgctgaccctattcgtaattagtgtgtacgccctgattgtcctgtactttgtgcgggactttcgtaagggtctcaaggtacacaaagcatctttcagttacatgaagtggggcttcttgcctcgctttactgtacgtctacctaatggccgttttaaggctaacaaagtggggatattctatgtcgcaacgcactaacctgaagaaagccttcaagattgcacggatggtgatgccatacggtgccggggagaagcggacaaggagaatacttgcggcaagggctggaagattaccagctaggcaccgcaaatgggtaatgcagcaggtctacgtggagttgtatcaccctcagcggataccggatggctacatacggtcgcctataggctggaaacgagtagcaactaactaaaccactgacacacgcaccacaaggaaacaacctaatgaactacaccaacatgcaagaacgcttagacgtcatccgtaacctgccaatctgtgaactcgacaagcgccagccactgctggtagcactcatcgctgacattgtgaactacgagacgtccgatggtgacgatacggacagcgattgtggccttgagcgtcaggactattggcaaaccctgaagattaaggccaaagacgctgggtttaacctgctgggcaacggtcacttcagcgcagcgtttaagcacgagctgctgccgggtagggtcattaaggttggctttaagaaagaagactcaggggccgcctacgtggctttctgccggatgcaccaaggccgggtagggatacctaacgtctatcacgtagcgcgccacgctggctgctatacggtggtgctagatgagctggaaccatgccagcggcgagagaacgagacgcacgagcattacgcggacctagcgaattactttgtggagaactctggtgcagagctgggggatgttgacggtgcagagaaggaattaccattcatcgagacatgcaagatgattaacaagttcttccatggtatcgcatccttcgatatgcacagcggtaacatcatgttcaccaaagacggcaagccagtgattactgacccggtgtcattctcagcggaccgggaccgtgagcctttctcactggaacctgaggagctactcgtagagattgagcagatagcacacgccaagatgattgaacgctgtaagcgcaacaaggctaagcgagaccgtgacagcacgctgtgtcgcgcccgtagggacaacaacaaggcacgccgtaaggcctacaaggcacacgctaggtggcgtaaggagcgcgagcggattaacgctgaggccctaaagtatgacctagcgaaaatcgagcagcgagtgcacgcatggatggcctgcgacggtctcgccatacagcaaggccggggccttccggtggacaactaccttcagggtagacttatgggttagcaaggtgtatcttaggtgtctctcacgcaagaggcaccaatagataaactttattcacaaagaggcacacaatgaacgcattaaacattgcacgtaatgacttctcagagattgaacttgccgctattccgtacaacatcctcagcgagcactatggggacaagttggcacgtgagcagctggcccttgagcacgaagcgtacgagctgggcgagcagcgtttcctgaagatgctggaacgtcaggtcaaagccggggagttcgctgacaacgtggccgctaagccgctggtcttaacgttgcacccacagctgaccaagcgtattgacgactggaaggaggagcaagcaaacgctcgcggtaagaagccccgcgcgtactacccgattaagcacggtgttccctctgagttggcccttagtatgggcgctgaggtgctcaaggagaagcgcggagtgtctagtgaggcaatcgcactgctaaccattaaggtcgtcttagggacgctcacagacgcctctaaagcaaccatccagcaggtatcctcacagttaggcaaggcccttgaggacgaggcccgcttcggccgtatccgtgagcaggaagccgcctacttcaagaagaacgtagcggaccagctggacaagcgcgtaggtcacgtgtacaagaaggcattcatgcaggtcgtcgaggccgatatgatttccaaagggatgcttggtggtgacaactggtccagctggaaaactgacgagcagatgcacgtagggaccaagctgctggagctgcttatcgaggggactggtctggtggaaatgaccaagaacaagatggctgatggctccgatgatgtgaccagtatgcagatggtccagctggctccggcctttgtggaactcctgagcaaacgagcgggcgcactcgcaggtatcagcccgatgcaccagccgtgcgtagtccctccgaaaccttgggtggaaaccgtaggaggtggctactggtcagtcggtcgccgtccgttggcactggtgcgcacccactccaagaaggcactgcgccgctacgcagacgtgcacatgccagaggtgtacaaagcggtcaacctagcgcaaaacacaccgtggaaggtcaacaagaaggtgctggcggtagtcaacgagattatcaactggaagcactgcccggtaggtgacgtcccggcgattgaacgcgaagagttaccaccacgaccggatgatattgacaccaacgaggtggcacgtaaggcgtggcgcaaggaggccgcagctgtctaccgtaaggacaaggcccgacagtctcgccgtttgtcaatggagttcatggttgcacaggccaacaagttcgctaaccacaaggccatttggttcccgtacaacatggactggcgcgggcgtgtgtacgctgtgagcatgttcaacccgcagggtaacgacatgaccaagggtatgctgacactggccaagggcaagccaatcggtctcgacgggttctactggctgaagattcacggtgcaaactgcgcaggcgtcgacaaggttcccttccctgagcgcatcaagttcatcgaagagaatgaaggtaacattctggcaagcgcagcggacccactgaataacacttggtggacccagcaagattcaccgttctgtttcttagcgttctgctttgagtatgcgggcgttaagcatcacggcctgaattacaactgctcgctgccgctggcgttcgatgggtcctgctctgggattcagcacttcagcgcaatgctccgcgattccatcggtggccgtgccgtgaacctgctgccttctgataccgtgcaggatatctacaagattgtggccgacaaggttaacgaggtgctccaccagcatgcagtcaacgggtctcagacggtggtcgagcagattgctgacaaagagactggagagttccgcgagaaggtaacgctgggtgagtccgtactggctgcgcagtggctgcaatatggtgttacccgcaaggtgactaagcgttccgtcatgacgttggcgtatggttccaaagagtttggcttccgccagcaagttcttgaggacaccattcagccagctattgacaacggcgagggcctgatgtttacgcaccctaaccaagcggctggctacatggctaagctgatttgggacgctgtgaccgtgaccgtagtggccgctgtcgaggcgatgaactggctgaagtctgccgctaagctgctggctgctgaagtcaaggacaagaagaccaaagaggtactgcgtaagcgctgcgcaatccactgggtaacaccagatggcttcccggtgtggcaagagtaccgcaagcagaaccaagcgcgcctgaagctggtcttcctcggtcaggccaacgttaagatgacgtacaacactgggaaagactcagagattgatgcacacaagcaggaatccggcatcgctcccaactttgtacactcacaggatggtagccacctacgcatgaccgtagtgcacgccaacgaggtctacgggattgactccttcgcgctcattcacgactccttcgggaccattccggcagacgccgggaatctctttaaggcagtccgtgagacgatggtcaagacctacgaggacaacgatgttatcgctgatttctacgaccagttcgccgaccagctgcacgagtctcaactggacaagatgcctgcggtcccggccaaaggtgacctgaatctgcgcgatatcttagagtctgacttcgcgtttgcgtaaggtctcgggcaattagggcacactatagggaaccttcgaatgaccgagggttccattacttaaagtcttaacttaaagaatacttaaagaggcacgccatgacttactcactcgttgtaaccatcttgttaatcatcacccttacactcctcattaacgccatacgcaattcactacgcagcgaggagcgactggagcgcaaggtccgagaggccaactccgcgtttaacaatgagtcctgcaaggtcctgcgactggcagacaaggccgactcgctcagtagacaggttcgttacttagagggcgagcttgagagtgagaaacagaaggtgcgcgacgtgaatgaactcagggcgcaccagcgggaccgcatgaagttcctccgcaagtcgctgaaggaagcacaagacgagctgatgatggtctccgacctgattcacgttaagttcaccgcagtgttgccggatggcacccactctaagacgctctttaagttaggacttgggccgtgtggtctgcacgttaagtccctccgctggacagagctagatgaccgctatctgatagaccagctgtgcacaaacggtgagcgcaagcagttcgtctactacaagagcgaagtagtaggtcgcatcgagttccgccacggtaagccgtaattaggacccactatcaggaacatactcaaggtcatcacgtttggtggccttcatgaatgtcccttactatcacaatcaggagcaacaccatgtatcagaacacaatcaactttgagcgcacccgtgaacgtcagcagaccgagggttacatccctaagggccgcaagctgaacaagacgaagcgcggtggtggcgtgaagggttccttccgtaacgcgaagggtgacagcgttgttaaccaagagaaatacttcgtaggagcgtgacaaatggctgagcaaagtaagtatctattcgatggtagcacctcacagtggtctcgattaggtcatgcagagcgtagactgctggacgagacgatgttaagggtggtaatggcgtaccacacgtggaaccatacagtctctctctcagtatacgcgccgcacccagacggtgacgagctgttagttgagaaatctttcagtcgctggtcgattgactcagcgtcagactggttggctaaactgaccgctgattattcaagctggaagtaattaggacacactataggcagactcaaggtcatcggaatccggtggcctttatgattgcttattgcacactaaatgaacactacacttcggagacatcatcatgatgaacattaagaccaacccatttaaggccgtttcattcgttcgctctgctatcgagaaggcgctggagacttccggttacctcatcgcagacactaagcacgatggtgtacgcgggaacatttgcgtagacaacacggccaacgcagcgtggctcagccgggtctccaagaccgttccggcccttgagcacctcaacggtttcgaccagcgctggcagaagttactgaaagatgaccgctggattttcccggatggctttatgctggatggagaactcatggtcaaaggcgtggacttcaacaccgggtctggcctgctgcgcaccaagtggctcaagaagggaaacatgcagtttgacatcggtggtccatatgaacaatgggagcctgacatgaagggtcagcccttcgcactccacccgaatcacctcaaagttgtactctacgatatcattccgcttgacattatcgagtccggtgatgactacaacgtgatgaccctcctccgccttgagcacgtcaaggttgccttaccagtcctgcaagaccacttccctgaagtcgagtggtgcctctcagagtcccatgaagtttacgacatggacgaactagatgcgctttaccgacagaagcgcgaagaaggtcatgaaggtctcgtagttaaggaccctcagggcatctacaagcgcggtaagaagtccggctggtggaaactgaagccagagaatgaggctgacggtgtcgttgtgggactcaactggggaactcccggccttgctaacgagggcaaggtgattggcttcgaggttctccttgagtcaggtcgagtggtgtccgcaaacaacatctctcaggcacttatggatgagttcacgcgagccgtggaggccacagcagaccatcacgaaggttcctacactaacccctacgatggatgggcgtgtcaaatcaagtacatggaggaaactccagacggctctcttcgtcacccgtcgttcgacaaatggcgtggcaccgaagctgacccgaccatcaagatgtaattaggacccactataggagacaccaaatgtctatcaacctgattctaatcatcgtgttcatcctcgcggctatcgtgtggtcaatgaacgacgagccacctaaaggagcataaaccatgcgcttacacttcaacaaatccaacgatatcttctcggttcgccgggaggaccgcagcattgtagctgcctcggagcgacacggtaagattccacgtatcggcgacaccttcgagctggcacctagcgtgcacatcttggttactcgcggtctctacgaattggctcagtctaagagccgtcctttcgtacccgttgtggtaaccaagtggccacgccttcgcctgttctgggagcgcatcaaggaggtggtcaatgaataaggcggaaccatacatcaccctacacgcaagccactgtcgctcggtactatcatttggggcgtgtgactgcggtgctaagcctgcaccagttaaacgacagactgtagacgacggtgttaagcagccgagtcactaccaactgttcgaaggcgtcgaggccatcgaggtgattgcccgcagcatgacccaagagatgttcaaggggtactgcctcgggaacatcctcaagtaccgccttcgtgctggtaagaagtccgagctggctaccttagagaaagacatggcgaaggccactttctatctggagctatacaccaagcacaagggtctgtgttatgacgcctagtgaatggtgccgagcgatgtacgagaagacgctcgaccctgcgtacatcaccctgtacaacatgtggaaggagcgagaagatgcaaaagttcgtcgtaacggtcgagacagctaacgcttcgtatgaactcccggtacacgctgggtctcttgaggaggccctcgaagttgccgaggcggagtatgaagagttaggccaagtgactcgggtacgcccggatagtcattaggacacactatagggacacaggttgtccctctttctgttataaaccaaaggagattcatcatggcattcgctaagaagaaaatttacaccactaagattggcacctgtgagccatacgcttacttcaacaagccggactatggcggtgagggttttgagaacccacgcggtacctacaagggttccgtaacgttcaagaacgaagactgtcaggacctcgtggacctcatcgttaagacccatgaggaaaactacgccgctcgtctggaagcgcacgaagcgaacccgccgaaggttcagaagggcaagaaacccctgaagccatacgaaggtgacatgccgttcttcgacaacggtgatggtaccaccacgttcaacttcaagtgctacggttcgtacgaggacaagaagactggcgagaccaagaagattgttctgggcgttgtcgacgctaagggcaagcgcattcaggacgttccgattatcggcggcggctccaaagtgaagattcgcttctcgctggtaccgtacggctggtctgcggtagctggcgcttccgttaagttgcagctggaaggcgtaatgctggtcgaactggctacctttggtggtggcgaagatgactgggctgacgaagccgtagaaggcggttacgaagcggacgaatctcgcagccgtaaacctcaggaagacccggaagactggtctggtgaggaagaggacgagggtgaagccgaagaagatgatgacttctaatggctggatatggagccaaagggattcggaaggtgggtgccttccggtctggccttgaggacaaggtgtccaagcagttagaatcaaagggcgtcacgttcgactacgaattgtggcgcatcccttacgttattcctgcgagtgaccacctttacactccagacttcttgttacccaacggtatcttcgtggagactaagggtctctgggaagccgaggaccgcaagaagcacctattgattcgtgagcaatacccggagttagacatccggttagtgttctcttcgagtcgcactaagatttacaaagggtcaccaaccagttacgctgagtggtgcgagaagcataacatcttgtttgccgacaaattgattcccgtagactggctgaaggagccgaagcgtgatgtaccgttcggcaagttcaagcagaagaaaggagcaaagtaagtatggccaaggttcaattcactaagcgcaaggagacctctcagattttcgttcactgttcggccaccaaggcaaccatgaacgtaggtgtccgtgagattcgccagtggcacaaagagcaaggttggcttgatgtgggataccatttcatcatccgtcgtgatggcaccgtagaggctggccgcgaccaagatgctgttggttcacacgtcaagggatacaactcgacttctgtcggtgtgtgtcttgttggtggtatcgacgccaagggtaaccctgaggcaaacttcacgccagcccagatgcagtctctgcgttcactgctggtagaactgaaggtgcaatactctggggccgttctgatggcacaccacgacgtagcacctaaagcctgcccgagcttcgacctgaagcgctggtgggagaagaacgagctggtcacttctgaccgtgggtaaacattagggcacactacagggagacaattacgtttccctgttgtcgcttgaggagattactttatgaacaagttgaaacaacacttcgctgacaattggcctgtgtacatatatgcagcatgctttgttatcggcgcactccgagtgtggttaccatgagttacggtgactctcaagaagatggtcaggagagtatcttcctgttccacgctccgtgcgaaaactgtggttcttctgatggtaactcagtgtactctgacgggcatgagtattgcttcgtgtgtcaacaccgggtgagaggctcagaggaacgtaccgaaaagttatcatcaagaagacccagaggagggaattacgggatgagtacacaaggtgcaggactattggtattcggcgagaatgacggtcggtacactgacctgacggctcgttgtatctcaaaggcgacatgccagaaggctggctattgggtcgccaaggtcagagggactgcctatcaggtggccgactatcgtgaccagaatggctccatcgtctcccagaagctgcgggacaaggagaagaacttctctaccagagggtctcacaaaggggatgcactgttcggtaagcacctatggaatggtggcaagaagattgtcataaccgagggcgaaatcgacatgttaaccgtgatgcaacttcaggactgtaagtggcctgtggtttctctcggtcacggtgcgtcagccgctaagaaaacttgtagtgcaaactatgagtatttcgatagcttcgaccagataatccttatgttcgacatggatgaccccggtcgtgcagctgttgaggaagccgctcaggttctccctcccggtaaggtccacgtggccgtgctgaccgagaaggatgccaacgagtgtttactcaaaggcaagggcaaggaggttctcgaccagatatggaacgcagcaccttgggtgcccgatggtgtaatcggagcgatgtccatgaaggaccgagtgcgtgaggccatgaccagcgaacaaagcgtaggataccttttctcgggatgtccgggactgaatgaccgaaccttgggtgcacgtggtggcgaagtcatcatggtcacttctgggtcaggaatgggtaagtctacgttcgttcgccaacaggccctagggttcgccagagggcaaggactgcgagttggtatggcgatgcttgaggagtccgtagaggagaccatggaggatgtcctagggattgccaacggtatccgcttacggcagcagcctcgggagttcaagcagaaactgatagaagacgggacgtacgacaaatggttcgatgagctgtacggcaccgaccagttccatctctacgactcctttgcggaagctgaggtggaccgactgttggccaagctgcactacatgcgcacagggttaaactgtgacgtaatcattctggaccacatctcaatcgtagtgtcggcctcggaggaatccgatgagcgcaagatgattgaccgactcatgaccaagctgaaagggttcgctaagtcaaccggagtggtacttattgttatttgccacctgaagaacccggagaaaggtaaagctcatgaagaaggacgtgctgtttccattactgacctgcgtgggtctgggtctctgcgccagctctctgatactatcattgcacttgagcgtaatcagcaaggggatatgcctaatcttgtcctccttcgtattctcaagtgtcgctttaatggtattggcgttggcattgcagggtacatggagtacaacgaaaagaccggactccttgaaccgtctagctacactggcggagaaggagagggtgatactggctgggaaggacacgaagaagacgactactgagaagtgtcaatgcccagcgtgtgactgggcgtcaccatattgtaaccactgaaaggagaaccaccatgtttaaattaatcgagaagttaggccgtctggtcatcgcactgtacatccgtgaagccaaggcactggacaaagcgtccaaggtggaagcgaaagcagccgctaagctggctaaggcagccgacaaggcacgtcaggcatctctggatgcaaccgcagaggcagctaaagttgcagctaaagctcagaaacttaaggagttcttctaatgactaccaaagctaaattccccggcaacaccattcagctgtccgacactgtagaccagtggggccgcaaggttcacatcaacgtccgcaacgacaaggttactctggtctaccgctggaaggctaagagcgataaccgtgcgcacactcagcgcatgacccttgacgatgtacaggctgctcgactgctggcatccgtagccgtagcagcgactgtggctgtgggtgaagacaaagttcgggaggcgctcctgacaaaagaggtcggcgaaacgtccttatgtctggccgcatcgtcagaagccaagtgataaactcaaggtcattactatatgtagtggcctttatgattatcatacacaacatattgaggagttacaccatgcgtaaacccgaagagattcgtaaagagattgaagcgctgaacaaagagctggctgaggccaagacctatgaggccaagcgtgacgctgctgttcacattctggagaaccttgggtggacccacagtggtcacaagggctggcagagacctaaggatggaccgaaagtatccgactacaaggccccactgaaggctggcgagctggcaacgtgggaggacggtaacattggtggaaccgtatatatccgtagcgtaggtaacaaattctctcaggtgtctcacgtccgtggccttagtcgtctgggtgttgacgtccttacgggcagcttcgccgttgagaacagtaagttaaccatccgtccgcgtgagtatttcctcgggcgtcgctaagtaacaggagaccactatgttagtaaccgatattgaggctaacaacctattagagaaagtcactcagttccactgcggtgtcatttatgactacagcacggacgagtacgtatcgtatcgaccttgggacttctcagcgtatctcgatgcgttagaagctgaggtggctcgtggtggtctcatcgtattccacaacggtcacaagtacgatgccccagtgttgaccaagctggccaagctccagttaaaccgagagttccacctgccgcgtgagaacgtagtggacacgttggtacttagccgtttgctttttgcgaacattaaggactccgacatggccctgctgcgttccggtaagttacccggcaagcgcttcgggtctcacgctctggaggcgtggggttaccgcttaggcgagatgaagggtgagtacaaggacgacttcaagaagctccttgaggaacagggtgaggattacgtggacggtgctgagtggattagctttaacgagccgatgatggactataacgttcaggacgttgtggtaaccaaggcgctcttagagaagctactgagtgacagtcactatttccctgaggatatcgaactgtatacccacagctactctatggaacatccgttctggacactctcctgcgaggccgtctggctggaacaccgagccgcttggttactcgctaagcaggagcgcaacggattcccgttcaacaccaaggccattgaggaactctacgtcgaactcgctggtcgtcgttctgaactccttcagacactcaccgacactttcggaacttggtatcaacctaagggcggcactgagttattcctgcacccgcgcaccgggaagcctctggggaaatacccacgagtgaagtacccgaagcagggtgccatctacaagaaacccaagaacaaagctcagcgtgagggccgtgaaccctgcgagctggacactcgggattacgtagagggcgctccgtacacaccagtagagcacgttgtgtttaacccaagtagccgagaccacatcgcgctcaaactgaaggaagccggatggatacctacagagttcaccgaaaagggtgcacccaaggtagacgacgaggtccttgagcatgttcgtgtggaagaccctgagaagcagcgctgtatcgacctcattaaagagtacctgatgatacagaagcgtatcggtcaggcggctgagggcgacaaggcgtggctacgttacgttcaagaggatggtaaaatccatggaagtgttaaccctaatggtgcagttacagggcgagcaacgcatagcttccctaaccttggtcaagttccgggcgttcgttcgccgtatggtgaaccttgtcgagcagcgttcggcgcagagcatcacttggacggacttaccggacagccttgggttcaagcaggcatcgacgccagcggactcgaactccgttgtctggcacacttcatgtctaagtacgacgacggggcatatgcggatgtcattctcaacggtgatatccacacagtcaaccaaacggcggctgagttgccaacacgtgataacgccaagacattcatctacggtttcctctatggtgctggagacgaaaagattggacagattgtgggcgcaggtaaggaacgcggaaaggaactcaagaagaaattccttgagaacaccccagcaatcgcagccttgcgtgaaggaatccagcagaccctcgtcgagtcatcccgatgggttgccggggagcagaaggtcaagtggaaacgacgctggattaagggactggatggaagaaaggtacacgtacggtcaccacatgccgcgctcaacacgttgcttcagtcagcgggtgcgctcatttgtaagctgtggattgtcgagactgaagagttgcttcttaaagcaggattgaagcacggatgggatggcgacttcgcctacatggcgtgggttcacgatgaaatacaagtggcctgccggaccccagagattgcacagcaggtgattgacatagcgcagcaggctatgcgtaacgttggggaccactttaagttccgttgccgtctggacacagaaggtaagatgggccctaactgggccgtatgtcactaataatacaggagatttatcatggctattaccaagcgtgtacatgtaagttttgatgctaagttggtactgtctaccgaagacgtcgagaagattgctaaagacctagtggtggcttccaagggtttccttgagggtaagccaacagatggtcgcaagctggctggtatcgaggctgctgtaactgatgggccggaggcagcaatcgagctggcactgaagggcatcataacccaagagcttaagtctttattgaacgagatgaagttcaactccttcggtaacttccgagtggggttcaagcaatgagcgagtacctaaaagttctggcggccctcaagggctgccctaagtccttccagtcgaactacgtgcgtaacaacgctgcgttagtcgctgaggctgcgagccgtggtcacatttcgtgtctgaccatgagtggtcgtaatggtggcgcttgggaaattaccagtgccggagtgaaattccttaagacccatggaggttgcttatgagcaagcacacattgttatccttcagcgactaccgggcaacccagaagattgccaagggtgtccttgtgatggatggtgactggctggtgttccaagccatgagcgccgctgagttcgatgcctcgtgggaggaggagatttggcaccgttgctgtgaccacgctaaggcccgcgagattctggagaactccattgaatcctacaagggccgcaagaaggcgtggaagaatgcagacgttgtcctagcgttcacagaccgtgtcaactggcgcaagctgctggtggacccaacgtacaaagagaaccgcgcagtcgtcaagaaacctgtgggttacttcgagttccttgagtctgtctttgagtcctacacgtgcatccttgagcctcagctcgaaggcgatgacgttatgggaatcatcgggtctaaccctctcgtatacaactacgagaaggccgtactggtctcctgtgacaaggactttaagaccataccggactgcgacttcctgtggtgtacgactggtaacatcctcgtgcagacgcaggagacagccgactactggcatctcttccagactatcaagggtgacatcaccgatggttacggtggcatccccggttggggcgataccgcagaggacttcctcaaggaacccttcattgtggagcctgtaacgtccgtgctgaagtccggcaagaacaagggccaagaggtaaccaagtgggtgaaacgcgctcctgagccgggagagacgctctgggactgcattaagtccattggtgccaaagcagggatgaccgaagcggaagtaatcaagcagggccagatggctcgcatcctccgttctgatgagtacaacatcgagacgggggagattactctatggcaaccgggcagctgattctcatcgtacttaccatgggcttagtcgcgcgtggtctctggatgttggccttgattatcaagcagatagtcgagcataaagcagagtgataaactcatgggcacaattaggacccactatagggaagtgcccattatgattattacttaaagattacttaaagaggagactcaaatgttaaaacctatagagcacatccttaacaatcccaatgaccttcccgatgtaccgcgagctgtcaaggagtacctacagtctcgcttcaatgctgacttcctgtatcagtcagaggttcgtaagctgcgtgaggctggccacagtgaggagttcatctccggtgtactgtatggtcactacatggcttctcgtgtccttgacgagatggagggtcgtcagcgtgcactcaaagaaggagattgattatgtgtttctcacctaaaatgaaagcacctaaggtcgacacaacgactgtccctgagccagcaccactaaccgaggaacccaagggtatccagtacggtggcgacgaggactcaaacagcaccactcctgaggtgtcagggcgtaagtcactcaaggtgaccaagacgacagaacctacagggtccgtcagtaaaatccgtaagtcagctttaggaggctaacatgggactgttcaagaaaatcaagaaggctatctccaaggtagccaaggcaccactcaaggccgtcggtctagcagcagatgcacctaacgtgcagacagccgcagataccacagtggcagcgcctcaggaagcaccgaaagaggtcgtggaggacgttgaatcttcagcagacactgagtctggtaagaagaaatcccgagcgtctggcaagaagtccctctcagtttcccgcagctcaggcggtgggattaacctgtaaggaggtgacccgtggcagaagttaaactcgaaggcttcgcagaggagggagccaaggcggtatatgaccgtctgaagaacgaccgacaaccttacgagacacgagcagagtcctgtgcgcagtacacgattccctcactgttccctaaggactccgataacgcatcgaccgattacacgactccgtggcaatccgtaggtgctcgcggcctgaacaacctagcgtccaagctgatgctggccctgttcccgatgcagtcttggatgaagttgaccattagtgagtacgaagcgaagaaccttctgggtgacgctgagggtctcgctaaggtcgatgagggcctctcaatggtagagcgaatcatcatgaactacatcgagtccaacagttaccgagtgactctctttgagtgcttgaagcaactgtgtgtggctggtaacgcgctgctgtacttaccggagcctgagggttacacaccgatgaagctctatcgactgaactcatatgtggtccagcgagacgccttcggtaacgtactccagattgtcactctcgacaagattgcattcaacgctctccctgaggacgttcgcggccaagtggaagcagctcaaggtgagcagaaggaagacgctgagattgacgtctacacccacgtgtacctgaatgaagccggggatggctactcgaagtatgaagaggttgccgaagaggtagttccgggcagcgaggctgagtacccactcgaagagtgtccgtacattccggtacgcatggtccgcatcgacggtgaatcctatggtcgttcctacgtggaagagtatctgggtgacctcaagtccctagagaacctacaagagtccatcgtgaagatggccatgattaccgctaaggttatcggtctggtagacccggcaggtatcactcaggtccgccgactcacggcagcacagtctggtgcgttcgtaccgggccgtaagcaggacattgagttcctccagctggagaagtccggtgactttaccgtagcgaagaacgtaagcgacaccattgaggctcgcctctcgtatgcctttatgctcaacagtgcggtacaacgtactggcgagcgagtcacagccgaagagattcggtatgtggcgtcagagctggaagataccttaggtggtgtctactcgattctctcgcaggaactccagctgcctctggtaagagtgctcttgaagcaactacaagccacgcagcaaatcccggagttacctaaagaggccgtcgagccaactatcagcactggccttgaggctatcggacgtgggcaggaccttgacaagctggagcgctgtattaacgcatggtcggcccttaaggccctcgaaggtgatgatgacctcaacttggctaacctcaagttacgtatcgctaacgctatcggactcgacaccgctggtatgcttctcactcaggagcagaagaacgcccttatggcacagcagggtgctcagattgctactcagcaaggggccgcagcgctgggtcaagggatggccgcacaggctactgcaagtcctgaagcgatggccgcagcggctgattcagtcggtatgcaaccgggcatgtaattagggcacactatagggagacacatccagattgaatgaggtctggtcagaaggttcgagtccttcgtgtttccctcttagtcttaactttaaggagattgaaatggctggcgaatctaacgcagacgtatacgcatccttcggtgttaacagtgctgtactgactggtagtacacctgaggagcaccaagaaaacatgttggctcttgatgttgctgcccgtgatggcgatgatgcaatcgagctgaacaccaacagtgatgacccgtatggctccgatgtggacccgttcggtgaacctgaagagggccgtatgcaggtccgcatctccgctgacggttcagacgaacaggaaggcgaagagggtcagggcgacgaagaacagcagggcgacgaagagggtcagctggaggaagtaaccgacgatggtgaacctgaagagttcaaaccgattggtgaaactccggctgacatcaacgaagcctctcagcagctggaagaacacgaagctggctttaacgacatggttgccactgcaatcgaacgcggtctctcacaggatgctgtgacccgtattcagcaggagtaccagaacgaagaccgcttgtccgaggagtcttacaaagagttggccgaagctggctacagtaaggcgttcgtcgatgcgtacattcgtggtcaggaagctctggtcaaccagtacgtcgagaaggtgatggacttcgtgggaggccgtgagcgcttccagcaggtctacagccacatgcagaccaataaccctgagggtgccgaggcgctcatcaaggcttttgagtcccgtgacgtagccaccatgaagacgattctgaacctagcgggacagtctcgtgataaaacctttggtaagaaagctgagcgctctattgccaagcgtgcaaccccagcgaaacctgtggcccgcaaggctgaaggcttcgagtctcaagctgagatgattaaggcgatgtccgacccgcgctaccgcaccgactctaagtatcgtcgtgaggtggaacagaaggttatcgactctaagttttaattagggcccactatagggagagacagatagttcctctcggtctgaccgatgtcttggtctgtcctcccgcttcgagttacacaatgagtatcacctcgtttcaagtagtacctcaaaacatttcgtataaacaacataaggagattcaacatggctaacatgcaaggtggacagcagctcggtactaaccaaggtaaaggtcaatccgcagcagacaagctggcgctattcctgaaagtattcggcggtgaagtcctgaccgcattcgctcgtacctctgtgaccactaaccgtcacatgcagcgtcaaatcagctccggtaagtccgcacagttccctgtgattggtcgcaccaaggctgcttacctgcaaccgggcgagtctctggatgacaaacgtaaagacatcaagcacaccgagaagaccattaacattgatggcctgctgaccgctgacgtgctgatttacgacatcgaagacgcgatgaaccactatgacgtgcgctccgagtacacctctcagattggtgaatctctggcgatggcggctgatggtgcggttctggctgagctggctggtctggttaacctcgctgattccgtcaacgagaacatcgctggtctgggcaaaccgtccctgctggaagttggctctaaggctgacctgaccgacccggttaaactgggccaagcggttatcgcacagctgaccattgctcgtgcagctctgaccaagaactacgtcccggctaacgaccgtacgttctacaccaccccggacgtgtactctgcgattctggcggctctgatgcctaacgctgcgaactatgcggctctgattgaccctgagcgtggttctatccgtaacgtgatgggcttcgaagtcgttgaggttccgcacctgaccgctggtggtgctggtgatgaccgccctgacgaaggcgcagaagcgaccaaccagaagcacgctttcccggcaactggtggtaaagtcaacaaagagaacgttgtgggcctgttccagcatcgttccgctgttggtaccgtcaagctgaaagacctcgctctggaacgtgctcgccgcgctgagtatcaggctgaccagattatcgctaagtacgcgatgggtcacggtggtctgcgtccagagtctgcgggtgcgctggttttcacggcggcctaagcgtaaatacctttagtgctcgggtggtaactccacctgagtacgaggtacagactgtggctattgctggtgattcacttaaggtgacacttgatgggctggaaggagtgacggactggtcaagccttgaggtaacctatggtacttcagggattgccagccacactcgccgtaccaacacgctgtacttcaaaggaatcgctgtaggcgaaactctagtgactgtcagctttgacgggtctgaaatgaagtcctttaagctggtcgtgactaactaataagccaaaccccttggggaccactcacggtctctgaggggttttttcgttaggagcttacaatatgaacatgcaagatgcttactttgggtctgccgctgagctggatgctgtcaacgagatgcttgcagctatcggtgaatcccccgtgaccacccttgacgaagatggtagcgcagacgtagcgaacgcccgtcgaatcctcaacaggattaaccgccagattcagtccaaaggttgggccttcaacatcaacgagtcggccacattgacccctgataccagcactgggcttatcccgttccgtccggcctacctgtctatccttggtggccagtacgtgaaccgtggtggttgggtgtatgacaagtccacagggacagataccttctctggggcaatcacagtgaccctgattactcttcaggattacgatgagatgcccgagtgtttccgccagtggattgtcaccaaggccagccgtcagttcaactctcggttcttcggagcggaggacgtagagaactcgctggcacaggaagagatggaagcacggatggcgtgcaacgagtacgagatggacttcgggcagtacaacatgcttgacggtgacgcatacgtacaaggtctcatcagtcgttaatcagaaacctaaggaggaccaaatggctctcgtatcacaatcaatcaagaacctcaagggaggcattagccagcagcctgaaatcctacggtacccagagcagggttcgcttcaggttaacggttggtcctccgagactgagggtctccagaagcgaccacctatggtgttcatcaagtccttgggaggccgtggatatcttggtgaggacccctacattcacctcatcaaccgtgacgaatacgagcagtattacgcggtgttcactgggaatgacgttcgggtgttcgacctgtccggctatgagtatcaggtccgtggcgaccgctcttacgtgaccgtcaataaccctaaggataacttgcggatggtcacagtggctgactacacgttcatcgtgaatcgtaccagacaggtccgagaaagtcagaacttgaccaacggtgggaccttcaaggataacgtggacggtatcattaacgtccgtggtggccagtatggccgtaagctggaagtgaacattaacggcgtctgggtaagccaccagctacctccgggtgacaacgctaaggatgacccacccaaggttgacgcacaggccatcgctgaggccctagctgttcttcttcgcacggctcaccctacgtggacgttcgatgttggaacagggttcatccactgtatcgccccagcgggtaccactctggatgtgttcgaaacgaaggatggttacgcagaccagctaatcaatccagtaacccattacgtccagagcttctctaagttgccgctgaacgccccagatggttacatggtgaagattgttggggacacatccaagaccgccgaccagtattacgttaagtacgacaagagtcagaaggtctggaaggaaactgtaggttggaacatctcagtcggccttgagcaccacacgatgccttggacactggttcgtgcagctgacggtaactttgacctgagctaccacgagtggaaggaccgtcgagctggtgacgatgatacaaaccctcagccatcctttgtgaactcgacgataactgacgtgttcttcttcaggaaccgcttagggttcatctctggagagaacattgtgatgtcccgtaccagtaaatactttgagttctacccgccgtctgtggccaactacacggatgatgacccgctggatgttgctgtgagccataaccgagtgtcggtccttaagtacgctgttagcttcgctgaggagctgctgctgtggtccgatgaggcgcagttcatcctgtcagcaaacggagtgttatccgctaagacagcccagctggacctgaccactcagtttgatgtatctgacagagcgcgcccttatggtatcggtaggaatatctactatgcagcgcctcgcagctccttcacgtccatcatgcggtactacgcggtacaggatgtgagctctgtgaagaacgcagaggacatgacggcccacgtcccgaactacattccgaacggtgtgtacagcatcaacgggtctggtacggagaactttgcgtgtgtgttgaccaagggcgctcccagtaaggtattcatctacaagttcctctacatggatgaggacattcggcagcagtcgtggtcccactgggacttcggggagggtgttgaggtgatggctgcaaactgcatcaactctacgatgtacatgctgatgcgtaatggatacaacgtgtggattgctgctgtggacttcaagaaggagtcgactgacttcccgttcgagccttacaggttccacgtggacgccaagcggtcttaccacatctcagagacagcgtacgacgttgaaacgaaccagacggtagtgaacgtcaaggacatctacagcgcgtcgttctctaatggcactgtggcaatctgcgagagtgacggtaaaatcaccacgtatgagccgatgggtgactcttgggattcaaccccagacatccgcattagcggtgacatctcgggcaaggatatcgtcattgggttcctgtacgacttccaatatgtattcagtcggttcctcatcaagcaggagcagaacgatggtacaacgtccacagaggacgccggacgcctacagctgcgtagagcgtgggtgaactatcaggacactggcgcgttcactgtgagtgtcgagaatggcaaccgtgagttcaactatctggtcaacgccagagttggttccactggtctacgtctgggccagaaggccacaactactggtcaataccgattcccggtgaccggcaacgccttgtatcagaaggtgtccctgagttccttcaatgcttccccggtgtcaatcattgggtgtggctgggagggtaactacatgagacgtgccagcggtatttaactgaaggaatccttatggtgtgctcaattagggcacactatagggaggccacactaagaggggacttaaagcatgtacattagaaacactgtaagtaatgacttcgagttattcatcccggcctaccatgacgtacttgaggcacaggccatgggtatagaaccatcgttcccagcggttactgagtgtgtcacgttagaccacgatggttttcctttggctataggtggacattgtggagaccaatgctggttcgtcacgagtgaccaagtgtggagactcgacagggctggcaagctggagttccgtgagagaatcatggagtacagggacatgttattagatgtctatccatccctgtggaactttgtgtgggtcggtaatggtcctcacaagcgcttccttaagtccatcggtgcggtattccatgaggagtacactcaggatggcaagtttcaactgttcaccataactaggaggtaactatgtgctggatggcagcaataccgattgcaatagcagcggcgcagtctgtaggcaacgctcggaatgccgctaaggccactgggttacagaacgaccagatgcgccgacagtctgcccagatgattaaagagtcaaacattcagaacgctaacgccagccttgagcagaaacagaagctcgaagaggcaagcgctgagttatccgctaagaatctcgataaggttcaggccatgggtacaatccgtgcagccatcggagagggtaaccttgagggagctagtatggaccgcatccagcgaatcgaagagggcaagttcatccgggaagccaatgcggtcaccgataactaccgccgagactatgcgtcactcttcgctcaacagcttggcaactctgagtccactatggaccaagtgaaggccatgcagaaggctgaaggtaaaggtaagtctaagctggagcaggtactagacccgctggccattatgggttcacaggcagcgtcctcgtatgcttccggtgcgttcgacagtaagtccaccaaggccccaataagtcaggcccaaggtaccaaggtaggaggtaagtaatggctagtaaattagaacaagcattgagccaaatgccacaggccgggtctactcgtatccgtggtggtgcagcgtccatgcagtatcgcccagtgactatccaacaggaaggagcccgacagtctaacctagtgcaatccttagcgaagttcgggacagctatgggtgaggcgtacgatgcatacgacaagcgccagcgcgataaggccgatgagcggtccgatgagattatccgcaagttgaccccagagcagcgccgggaggcaatcaagaacgggaccctgctgtatcaggatgacccgtacgccatggaggccctgcggttcaagacaggccgtaacgctgcgttcctcattgacgacgaagtggcgcagaaggttcagaacggtgagttccgcactcgtaccgagatggaagagtatcgccacaagcggttgaccgaaggtgccaacgagttcgctgaacagttcatgattaaccctgaggactctgagttccagagagggttcaacgcgaacatcactgagcgcaatatctcgctgtacggtaagcacgatacgttcctgagcgagcaagcccagaagggtgccatattggcctcgaaggttgagctgtcaggcgtgcttaaagacccagccgttctggctcgcccagagtccggtgagttcttccaacgctacattgacaattcgcttaagacaggtagtatccctagcgacgctcaggcccagcaggtcatcatcgggtcccttaacgacgtcattcagcgtccgggtgctaccaacttcttgcagagccttgagggccgtccggtcacccttaacgggaagaccacgacctataaggaactgatgggtgaggagcaatggaacgccctgatggtcaaggcccagtcgactcagttcgacaatgacgctaagttgtctgaaggtttccgcctcgggattaccagcgcgttgaaccaagacgacaccagcaagggctgggagatgcttcagggtgccaaagcggaacttgaccgtctacagcccggtgagcagatgaccccagagcgtgagcgtttgattcaggctgaggagcaaatgcaggcccgtttccgtcaggaggcccaagcgaaagccaaggagatggacaagcggcagaagaccatcaacaagaatcaggtaatcgaccagcagtttaccaagcgtatcaacggtcagtacgtgtccaccagctacaaggatatgccgaccaacgagaacaccggagagttcactcacagtgacatggtgaactacgctaacggtaagctggctgagattgaccagatgcagctcacggagcaacagaaggaccgcatgaagctgagctacctccgggcagactcagagggtggagccttccgtaccgttgtgggccagatggtaaccgacgctgggtctgaatggtctgccgctgtgattaacggtaagttaccagaggataccacagcgttgaacaaactgcgcaccatgcgtaacaccgacccggacctcttcgctgcactgtacccggacaaggctgacttgttcctgacgatggacatgatggacaagcagggcattgacccgcagattctcatagacgctgaccgttctcgccgcagtctcaccaaagagatgcagtacgaggatgataaagcgtgggcgtccctgaagaacaactcagagtccccagagctgtctcgcattccagctagtctggacggtatggcccgtaagatttacgacagcgtcaagtaccggacaggtaacagcgacatggcaatgcagcagaccgataagttcctcaaggaatccactgtgactttcaaaggtgacgacgtggacggtgataccattggtattatcccgaagaacatcctacaggtcagtgatgacccacgcagctgggagcagggccgggacatcctcgaagaagcccgtaagggaatcatcgcggctaacccttgggtgaccaacaagcagctgacgatgtaccagcagggtgactctatctacatgatggacaccactggcactgtccgcatccgctacgacaaggagctactgactcgaacctatcaggaacagcagcagcgactggccaaggaagccgaagagaaggcacttaaggaagcaaccaaacgtgcacctatctccgcagccactcaggcccgtaaggcagctggtgagcgcgtccgtgcgaaacgtaaagccactccgaagttcatctatggaggtggcgatgagtaaacaataaggagacaacatgagctacgataagtccaaacccagcgactacgatggtatcttccagaaggcagcagactcccacggtgttagctatgacctcctgcgtaagttatcgttcaatgaatcatccttcaaccctaaggccgtctctaagactggccctaagggcatcatgcagttcacccgcaacacggcccgagctatgggccttaacgtgaccgatggtgacgacgatgggcgctacaaccctgagttagccattgacgcaggcgctaagctacttgcgagtctcgttaagaagtacaacggggatgagcttaaagcggccctagcgtacaaccaaggggaaggcccagcaggagcaccccagcttcaggcttatgataagggcgacttcgggtccatctcggaggaaggtcgcaactacatgcgcaagctgcttgacgtagccaagagtcctcagtctggtgctcttgaagcgttcggtggcatcaccccaaagggtaaagggattcccgcagaggatgccttcaagggtatcgctaagactggcaaagttggtactgagctgccggagtcccacgggttcgacattgagggtgtagcgcaggaagcaccaaacactccatacgctaaggacttctgggagaagaccgggactactctcgatgagtataactctcggtccaccttctttggcttcgggaatgctgcgagtgcagaactccagaactcgaccttaggtgtagctttccgtgctgcgcgggctgacgatgggtacgatgtgttcaaggacacgatgaccccgactcgctggaactcttatgttccctccaaggaagacctacagaagctgcgcgactctgggctacctccgagttactatggccgcgactctgggctacctccgagttactatggcgtggtgactggtggtgacggtgagaactgggacgcactcataaagctggccaaggataacttcgaggctgaccaacgggccgctgaggctggtactggtgcgaaactcgctgctggtatcgttggtgctggtgtggacccgctcagctatgttcctctggtcggtgtggccgggaagggactcaaggtggtcaataaggccctgcgagtaggcgcacaggctggggcacttagcgttgcctctgagggaatccgtacgtcagtagctggcggtgaagctcactacgctgatgctgcacttggcgggttactgttcggtgctggtatgtcggctctcagtgacgctgtggctgctggtatccgtaaggcccgtggcgttgagtctgtgaatgagttcgctgggccagcactccgtatggaagcacgagagactgccatcaacactggcggtcacgacacctcgacactacctccagagaacttctcgttcgagcaggaccacagaggtgttccgtttgctgaccacccgaacgaagagggcgcagtggttcttgccaatggttccatcctgagcgataccaacccgcttaacccaaggactcaacgtgacttcgcagagattgacccagagcgtgcagctcccggtatcaagctcggtgggttcactgagattggcctgaagaccttagggtccaaggatgctggtgttcgtgcaatagctcaggacctcgtgcgctctcccacaggtatgcaatcagggtctagtggtaagttcggtgcgaccgcttcggacattcatgagcggctccatgcgactgaccagcggatgtataaccagctgtatgacgctgttgaccgtgccatgaaggacccagagttctccgtgggtgagcagaagatgtcgcgtagagctatccgtcaggaagtctacaagcgtgcggccttggcgattgagcgtccagagttacaggctgatttgaccaaaggtgaacgtgaggtgatggacctgctgaaagagcacttcgacaccaagcgtgagctgatggaacagccgggtatcttcggtaacgctaacgccgtgagcatcttccccggtagtcgacacaagggtacctacgttcctaacgtgtacgacaggggtgctaaggaactgatgatgcagaagctgggcggacctgaaggactccaacaggcaatcgctcagagctggcttaccagttaccgagtgcgacctgaggtcaaggcacgtgtcgacgagtacctgatggaactcaacggctacaagtcggttgaccaagtgacacctgaggtggtccagaagcacgccatggacaaggcgtacggtatcagccacacagaggacttcacggcatctagtgtcattgatgataacatcacaggtctagtcggtatcgagaacaactcgttccttgaggcccgtaacatgttcgacagcgacctcccggttaccttaccggatgggtcaacattcagcgtcaacgacctgagggacttcgacatggcacggattatcccggcgtacgaccgtcgagttaacggtgatatctccatcatgggcggtagtggcaagaccacgcagcagctcaaggacgaaatcatggcgttagacaagcgggccgaacgtaagggacaactgaagggtgaagtggaagcattgaaggataccgttaagattctcactggacgtgctcgtcgtaacaacgatacagcctttgagaccgccatgcgtaccctgaatgacctagcgttcttcgctaagaacttctacatgggtccgcagaacctcacagagattgctgggatgttggctaagggtaacgttaaggcgatgctccacggtatcccgacgttgcgtgacctagccaccagaacctctccggtgtcaggtagtgaactccgtgaactccatggggcattgttcggtaaggaacttgaccagttaatccgtccgggacgtgaggacatcgtgcagcgaatccgtgaggcttccgataccagtggggccatggcgtcagtcattggtaccatcaagttcggtactcaggagctgtcggctcgttctccttggaccaagatgctgaacggtacggctaactacattctggacactgcccgtcagggtgtgctaggtgatgtggctggcgcggccctaggcggtaagggttccaagtttggcaaagagaacttcctcaaagctgcctctatcagtcctgagcagtggaagggaatcaagcaactctttgtcgaccacgcgactcgtgacgctaacggtcagttcaccatcaaggacaagaaggctttcgctcaggacccaagagcgatggacctgtggcgtcttgccgataaggttgccgatgagaccatgctgcgccctcacaaggtatcccagcaggattccaaggcgtacggtgcgggtgtcaagatggctatgcagttcaagaacttcaccatcaagtcactcaacgccaagttcattcggtccttctacgagggctacaagaacaaccgcgctatcgacatggcgttgacccacgtgttgtctctgggtatcgccgggacctactttgcgatgcaggctcatgtgaaggcttacggcctccaagagtctcagcgtaaggactacctgaagaaagccctgaacccgaccatgctgagctacgcagcgttgactcgaagttcccacactggtgccccgctgtctatcctttcgatgatggctggtgccgctgggtatcaggatgccaacatgctgcgctctacaatcttaccgaaggaggaacagttccagaagaaagacaaggcagcacagggtcgtaccgaggcgtctgactttgcgggtaacttaggttctcaggttccagcactgggttacatcgggaacgttgtggctaccgctaagaatgcttatggtgttgctacagcgcccaataagccgactgagcgtgactacatgactggcctgatgaactccactaaggagcttgtacccaacgacccactcacccagcagctcgtgatgaaaatctacgaagccaacggtgtgaccatcaagcagcagccaaagcctaactaattaggacacactatagggagaccgattggtttcccttctcattcaacttaaggaggtcacgatggaccaagaaattaaaacagtcatccagtatcctacagggtccactgagtttgacatcccgttcgactacctgtcccgtaagtttgtccgcgtatcactggtgtctgacgacaaccgcagactgctgagtaacataaccgagtaccgatacgtgtctaagaccagagttaaactgctggtagcaaccactggtttcgaccgtgtggagattcgacggttcacatcggcgtcagagcgagtggtagacttcagtgacggttctgtattacgagccaacgaccttaatgtctcgcagctacagtctgcacatatcgctgaagaagcccgtgatgctgcactgctggcaatgccggaggatgatgctggtaatctcgacgcccgtaaccgtaagattgttagactggctcccggcgaggatggaacagatgcaattaataagaatcagctcgacacaactctgggtgaagctggtggtattctgtcggatgtgcttactgctcagaaagagttctatgagtatctaactaatttcgctacggacaccgctatggtgcgtggagtgagctgggtgtacaaccaagggtctgcggttggtggcgagactatcatcacaattgataagacagagcgtgtatacgcggtcccattcattgaggtgaatggtagtcgtcaagaggtcggatatcactttgagttcgacgcgctgctccagagaatcaccttagcgaaaccactggttgctggtgacttcctgatggcaatgaccactgagagtaacatcccgttagaggacatgctggcctcagctgctggtgcttctaacattgggacatcgtctggtgagactgttcagaagattctggacggtgtaactcagctgattccttcagtggacgatttggaagctgtaggtaaggccaatggtcgccgggtgcgcaccgtgggttattacaccgggactaacgctggtggcggtctgtacacgtacaatgagtctcgtaagaatgagaacgacggtgtgacagttattaacggctgggtacgttcgtttgacaacgtccgctatgtaagtgatgctggtattgttgctgggatggcacccactgaggttgcacgccgactgaacatcctactgtccactgcaaagcgtggctgcacgtttgatggtgagggaatcccgctgactacctcaacccacattcggttactcaatacggacaacgttgaagtgcgggcgatgcgcatcactggggacaaggccacatggaccttcgttaataacgaccgtggtgtattccttgcgaatacctgtcattaccttgagattcacgggtgtgagttcgtaggagtccgtatgtcgcagccaaataccccaatcacctctaccatcacggctacaggtcgtattcaggatggtgacgctgggattgagctgaagacctgtaacgactccaatgtgcaccacaactacgttcgcggcgttaagacttggggcatcctgagcactaacggtacccgtccgacagttcgtaagaacctcgtggttagctgtgcgcgtcagtcaggtgtctctgtgtcaatcggtaccacatttgacgtggacgatgggactgttgcggataaccgaatctaccttgtgggcctgtatggtatcgaggtcgagaagtggaccaagcaatgtaaccgcctgagcgtctacggcaacgttgtgtccgaggcacagtatggtatccacgctgtcgggcttatccgtggcatgaacgcattcgataaccgcattggtggatgtcgctacgcaatggcagggaccagcctcaacgcatcactgggttcagagatgaacgcgcggaacttcttcaagtccaacgtgtgtattagtaactatgcaggcattgccccgtcgaactccttctatgtgacctacgcgaacaacctcgtaaacggatggcgcgatacggactacttcgtcaatgacccttacgacaccgtagagattgtggcctcagctaactctttctactcactgcgtaatctggatgttgacaagaagctgctcattaacgggaccgagtgcactgtgcagtcaagcaccgcgagtacagaccctgcgattgtcgctaagattggtctgtccacagtgtacctcattgtgtgcgataagctgccagcaggtctggaggatttcactccattcaagactcaggtgaccgccactacctcttacggttactggccgttctatcagaagaacacgggcgaccacctcattgataatacctttgagaacgtccgctatggcttctaccagacagctcaggctaccgagaataacgactgctgggccactggtaccaagttcgttaacgtgtcggtacctgtagctggtggggcgtggggtatcgaggtgagcaagtccaccttcatcaactgtcagcgctataccgacagtgccaacaaggtgaccttgaaccagctgggcctgtccgctctggctaccgtgggccatcctactgcggtcactgggtcggaaactaagcctactgtgacgttctacaactttgctaatgacatcgtggtacgcttccgtctgcgtgcttccaacgtatcgtggacaacagaagcctccagtatcaaccttgcgattaaccttaacggttcttccgtaggttacattcaggttacctctaagggtgccagcgtggatgggttcgttgacctgctgaacggtggacttctgcctaagggtgccaataccttacgtgttattgataccactggttccctgtcgtttgataactggtacattgagatgttcgttgcaagctaacttaaggagatttgcatgttaaacaatctgaatcagccgaaaggctcaaccattggtgtgctcagggatgggcgcaccgtccaagaggctattgacgagcttgagaagattaagactcgcaatgtagaccctgagcgtttccgtgagacgttgacgtcaagcgacgatgaggtatttgataagctgttcgagtggttagccactcagtcagacgttgttggtacagctagttcctcctatatcatagccctaccgcgcatgattgaccttaacggtcgtacctacacactgactaagcgtcacgtattggatggtaacttcggtattcagaacggtactatcctgatgtccggtgagggtgagattatcatgggcctcgacgcaggtactaagactcgccgtcacttccttaagtatgtacatttcgagtacatcggggaatccgaccgaagcacctctctggtaaccatggcacgatgcttcaactctgtggtgctattctgtaacttcattgctggtggtgataccgctcgcaacagagcgccgcgcacccgttacggcctgttcgcagggtccaccagatgctggggcttccagttaatcggtggtgagtattatggcggtgactgtgcgttgcgtgttggacgcgctaacgaccacactgggctgaccattcgtcccggtacagttcaccactctcgtgttatcaacatgctgctgtgtaacccggcaggtgcagaggtgtctggctgtaacattgaacacgcagacaacggtgcggttggtttagggattacctcaggtacaaacacctcaggtaacgcagcccatggtgttcgcatcaatggtgtgtacttctacaataacggtaacggctccagtggctcaaacgtagcacctgcgaatatcctcattggtaaggacattccgggaaccgaaggttgggacagaccgggcgagttgattacgtcaagtcaaaacacagcgcacagcattacggtatcagagtgctacatcgttagtccgaacacccagaacgcttggcaggttaacgccctgtacagtgtgtccttcttggataacaaagtgggactcaaaggtgacgctacgattcacggtgtgtacgacggtacgtgtgctaactgctgggctgtaggcaaccgagaccaaggcggcaaggtgttccagttctcctctacagcaaccaacacgattctgactacccgcaaaggtaagtggactccgaagattatcggtgagggcacggcaggtaacactacactgagtgcttctggcggtgcgtactctctggataatggaatggtaaccgtatcgtgcttcgcggtggtaggcactaaggaccctaacatggctgggaacctgaacatcaaactcccagtagcctgtgaggaccagcagcgaggtggtaacggaatttctctgattaacatccccgacgtatcgagtcctaacgggagtgttataatcattggggataccgctcgaatcatgctagggtctgcgaggttgcagcccgagaacatcacaactggcactgctatccacttctcagtgtcataccccgccgatgttaaggtataaggaggtaacatgttgtccctagacttcaacaacgaagttatcaaggcggctcccattgcgggggtcgctggggccgatggtgtagcgaggctcttttggggcctctcactcaacgagtggttctacgtcgcggcaatcgcctacacagtggttcagattggtgccaaggtagtcgacaaaatcattgactggaagaaagctaataaggagtaacatatggacctgattaagttcctcgaaatgttagacactgagatggctcagcagatgctcatggacctgaaggaccctgaacgtcgaagccctcagctgtacaacgccattggtaaactgctggagcgccacaagttccaaatctctaagctgacccctgacgtcaacatcttgggcggactggctgagggtctggaggcttacaactccaaggtgggcgctgatggtctgacagacgacgataagttcaccctacagtgatatactcaaggtactactatatgtagtgcctttatggatgtcattgcactacgctaggcgttcctacgtgaaatctgagaaacaacgggaggcattatgctggagttcacaaagagaatcgtcccgtatcttgtggctatcatggtgtttgccttcgggtggcacttggggtcacaatctacggacgctaaatggaaggaggtagtacagaatgaatacgttaagaagcaaacggctagagctgaaactcagaaagcgattgacgcagtatcggctaagtaccaagcagaccttgaggggctggagggcagcactgataggattattgctgatttgcgtagcgacaataagcggctgcgcgttaaagtcaaacctaccagtgtccccgcaggaccagacggtcgatgcctcgttgatggttccgtcgaactacacgaagcaactgctcgaagtcttatcgcaataacccagaaggccgaccttaaagagaaggccctacaggatacaattcgtaagctgcaagggaaaggaggtgaacattgagcaactctcagcaagccaagaacgccttaatcattgcgcaactgaagggtgactttgtcgcctttctcttcgtgctctggaaggccctgaacctgccggaaccaaccaagtgtcaaatagacatggccaagtgtctggcgaacccaaagaacaagaagtttatccttcaggctttccgtggtatcgggaagtcgttcatcacgtgtgcgttcgtagtgtggaccctgtggcgtgaccctcagttaaagatactgattgtctcagcctcaaaggaacgtgcggacgctaactccatcttcatcaagaacatcatcgacttgttgcctttcctgagtgagcttaagcctcgccccggtcagcgtgactccgtgattagctttgatgtaggccctgccaagccggaccacagcccgtcagttaagtctgtgggcattacgggtcagcttactggtagccgtgccgatatcatcattgcggatgacgtggagattccgggtaactctgcaacacaaggtgcccgtgagaaactctggacgttggttcaggagttcgccgcactgttgaaacctctaccgactagccgtgttatctatctgggcacacctcagaccgagatgactctctacaaggaacttgaggacaaccgtgggtactccaccattatctggcctgcacagtatcctcgctccaaagaggaagacctgtactatggtgaccgactggctcctatgctccgcagtgagtacgatgaggacaaagagggtctcagcagtcaaccaactgacccggttcgattcgactcaatggaccttcaggaacgtgaggtggaatacggcaaggctggctatacgcttcagttcatgctcaacccgaacctcagtgacgccgagaagtacccgctacgcctccgtgacgctatcgtgtgcggtctacaggcggacaaggccccaatgcattaccagtggctcccgaaccgtcagaaccgcaatgaggagcttcctaacgtgggtatgaagggtgacgagatttactccttccacacagcctccagtaacactggcgcgtatcagggtaagattctggtcattgacccaagtggtcgcggtaaggatgagactggctggtgcgtgctgtacaccctcaacggttacatctacctgatggacgctggtggtactcgcggttacgaagagaagtcccttgagttcctcgctaagaaagccaaacagtggcaggtgcagactgtggtctttgagagcaacttcggtgacggtatgttcggtaacgtgttccagcctgtgctcctgaagcatcacccagcgcaactcgaagagattcgtgctcgtggtatgaaagaggtccgtatctgcgatacccttgagcctgtactggcaagtcaccgcttggtcatccgtgatgaggtaattcgacaggactaccagacggcacgtgatgcagacggtaagcacgctctgaagtacagcctgttctaccagatgacccgtatgagccgtgagaagggcgctgtggcacacgatgaccgacttgatgcgttagcattgggtgtcgagttcctacgctctacgatgcagcaggacgctgtgaagatagaggctgaggtacttcaggagttcttggagcaccacatggagaagcccctaagtaacatctcccagttccgggccaccagtagcaacggtgtggacatccgatgggaagacgagggggatgacactatgttcatcgcatggtgattatgcagggattgtgcataaggattcattaggccacggaaggccacttaatgaaaacttcaggtataacagacacttggaattagggcccactatagggagagacccttgaagacttactataagactacttaaagtttcattcatatagttatgcacttaaagtctccttacagatagagggtagtgatgataatatcaccctctcaccataagacactaagagccaacataaggaggacctatgcgcttattgttaaccttactgcgccataggactacttggcgatttctgcttgtacttgctggtgcccttggggcttcactggttactcagcagcaactcagtggactggagactctcgtgtgctctctactcacttgtagcgattagggtcttcctgacgcgctagggattccgtagtgatgcttatcagcatacaccactccatccctctacagtcaatacttaaagttaaccttaggtgattcactgggtctacctacgggtctatgcaatgacctgaggactacctgaggttacctttaagaatattgcacaaagttctgagtgtacatctcacagtttacacttttggttatccccccggtaccctccagttcacccaaagtaaccataggccaccctaaccgaaggttaaaccttaggtggtacccttgggaatcccttaggtgatactatatgttgtggtgtgggacaccttaggacactatatgttgatgtctctgtgtccc

SEQ ID NO: 4 - DNA, 41444 bp, Unknown
  source: /note="Description of Unknown: KP3W-P0104 Bacteriophage sequence"
tatctgttggccctctttaagtaacaacctgaggtcatacctgaggtatccaccttaggacctcctgaggccatacctgagaccatataccttaggttaacggtgagtcatccggtgagtcatcactataaggctattgggtagtcattgtcaattcattctattaggacacactatagggagacacttaaagaggactaatagaatgcgacaagataataaatctaagacacttatagacatcataatgactcactctaagatgacagatagtggttgtatggtatggagaggtagaactaatagtaatggctatgggtctatcctgtggatgggtagaactcaattagtacaccgattggtatatgaggagtatcgggactatagcctaaggccgggacaagtggtaagacatatgtgtgacaatccacgatgtgtcaatccgggtcatctagtggtaggtagtcaggctgataacatggcggataaacttataaataaagtgttgacaccggagggaggtttcgttatagtgtgaatcgtcaaggcgacacgggaaaccggatagctaagacgccacggtcaagtggttaagtagacagcctgataagtcatacgaaaaacaggtattgacaagcagtataaacatcaagtagtatagcgtcactgattgagagcagtaacctctcaaggttcattaacaatatggattagtcaaaagctgatatgtacaccatgacattagtgtttaactagtggttacattcgggtctctggcaaggtacatcctgtcaccctgagagtagccacgatgataaccactaactgaaggatatacatcatgatttacaccaaagagccagccaacaaggtattcatgttcgttaccacttaccgtggccatgagtcgctcgaagttaacgagaagatgctcaaggggcttgtgcgcaccattaagacctatccgggtgcatacggcaacattcgtgatgaacatgtacagggctgctttaaagaagctggtatgcctgaggcaacgcaagaacgtacgctcaaggttgagtgcactgagaagcaagccgcagagttgacgtggctggcctgtaagacctactcgcaagatgctgtgctggtggtgaactcacagactcacacagccgcgctgtggtctatcgaggacgtaggtgagtacccacaggtctacccacgcttgaaagaggtgtccttaggggtacgctgcaacaagtggatgcaccaagtggcgaatgctattcaatcatcgacggacaatattgggaggtggtgtaagatgaaactctacgctatccacatccaaggctggtgctatacaatgacatgctatggccacagcgagcgggacgcgaggtctcgcttcagggaccagcacggttttggtaaaaggcttcctaatgggactcgcgtgtgggaggttgtatgaaacactacggactcacacagcaggacatgcacgaataccgcagcgcctttaagacggcctgcgagtgcactgctggcatacctgaagcaaaagccgactggttcggctactacatggcccagctggctcaaacttatcgcacacgcaaggtaatgtatgctgaccctattcgtaattagtgtgtacgccctgattgtcctgtactttgtgcgggactttcgtaagggtctcaaggtacacaaagcatctttcagctacatgaagtggggcttcttgcctcgctttactgtacgtctacctaatggccgttttaaggctaacaaagtggggatattctatgtcgcaacgcactaacctgaagaaagccttcaagattgcacggatggtgatgccatacggtgccggggagaagcggacaaggagaatacttgcggcaagggctggaagattaccagctaggcaccgcaaatgggtaatgcagcaggtctacgtggagttgtatcaccctcagcggataccggatggctacatacggtcgcctataggctggaaacgagtagcaactaactaaaccactgacacacgcaccacaaggaaacaacctaatgaactacaccgacatgcaagaacgcttagacgtcatccgtaacctgccaatctgtgaactcgacaagcgccagccactgctggtagcactcatcgctgacattgtgaactacgagacgtccgatggtgacgatacggacagcgattgtggccttgagcgtcaggactattggcaaaccctgaagattaaggccaaagacgctgggtttaacctgctgggcaacggtcacttcagcgcagcgtttaagcacgcactactgccgggcaaggtcattaaggttggctttaagaaagaggactcaggggccgcctacgtggctttctgccggatgcaccaaggccgggtagggatacctaacgtctatcacgtagcgcgtcacgctagctgctatacggtggtacttgatgagctggaaccatgccagcggcgagagaacgagacgcacgagcattacgcggacctagcgaattactttgtggagaactctggtgcagagctgggggatgttgacggtgcagagaaggaattaccattcatcgagacatgcaagatgattaacaagttcttccatggtatcgcatccttcgatatgcacagcggtaacatcatgttcaccaaagacggcaagccagtgattactgacccggtgtcattctcagcggaccgggaccgtgagcctttctcactggaacctgaggagctactcgtagagattgagcagaaagcacacgccaagatgattgaacgctgtaagcgcaacaaggctaagcgagaccgtgacagcacgctgtgtcgcgcccgtagggacaacaacaaggcacgccgtaaggcctacaaggcacacgctaggtggcgtaaggagcgcgagcggattaacgctgaggccctaaagtatgacctagcgaaaatcgagcagcgagtgcacgcatggatggcctgcgacggtctcgccatacagcaaggccggggccttccggtggacaactaccttcagggtagacttatgggttagcaaggtgtatcttaggtgtctctcacgcaagaggcaccaatagataaactttattcacaaagaggcacacaatgaacgcattaaacattgcacgtaatgacttctcagagattgaacttgccgctattccgtacaacatcctcagcgagcactatggggacaagttggcacgtgagcagctggcccttgagcacgaagcgtacgagctgggcgagcagcgtttcctgaagatgctggaacgtcaggtcaaagccggggagttcgctgacaacgtggccgctaagccgctggtcttaacgttgcacccacagctgaccaagcgtattgacgactggaaggaggagcaagcaaacgctcgcggtaagaagccccgcgcgtactacccgattaagcacggtgttccctctgagttggcccttagtatgggcgctgaggtgctcaaggagaagcgcggagtgtctagtgaggcaatcgcactgctaaccattaaggtcgtcttagggacgctcacagacgcctctaaagcaaccatccagcaggtatcctcacagttaggcaaggcccttgaggacgaggcccgcttcggccgtatccgtgagcaggaagccgcctacttcaagaagaacgtagcggaccagctggacaagcgcgtaggtcacgtgtacaagaaggcattcatgcaggttgtcgaggccgatatgatttccaaagggatgcttggcggtgacaactggtccagctggaaaactgacgagcagatgcacgtagggaccaagctgctggagctgcttatcgaggggactggtctggtggaaatgaccaagaacaagatggctgatggctccgatgatgtgaccagtatgcagatggtccagctggctccggcctttgtggaactcctgagcaaacgagcgggcgcactcgcaggtatcagcccgatgcaccagccgtgcgtagtccctccgaaaccttgggtggaaaccgtaggaggtggctactggtcagtcggtcgccgtccgttggcactggtgcgcacccactccaagaaggcactacgtcgctacgatgacgtgcacatgcctgaggtatacaaagcggtcaacctcgcgcaaaacacaccgtggaaggtcaacaagaaggtgctggcggtagtcaacgagattatcaactggaagcactgcccggtaggtgacgtcccggcgattgaacgcgaagagttaccaccacgaccggatgatattgacaccaacgaggtggcacgtaaggcgtggcgcaaggaggccgcagctgtctaccgtaaggacaaggcccgacagtctcgccgtttgtcaatggagttcatggttgcacaggccaacaagttcgctaaccacaaggccatttggttcccgtacaacatggactggcgcgggcgtgtgtacgctgtgagcatgttcaacccacagggtaacgacatgaccaagggtatgctgacgctggccaaaggtaaaccaatcggactcgatgggttctactggctgaagattcacggtgcaaactgtgcaggcgtcgacaaggttcccttccctgagcgcatcaagttcatcgaagagaatgaaggtaacattctggcaagcgcagcggacccactgaataacacttggtggacccagcaagattcaccgttctgtttcttagcgttctgctttgagtatgcgggcgttaagcatcacggcctgaattacaactgctcgctgccgctggcgttcgatgggtcctgctctgggattcagcacttcagcgcaatgctccgcgattccatcggtggccgtgccgtgaacctgctgccttctgataccgtgcaggatatctacaagattgtggccgacaaggttaacgaggtgctccaccagcatgcagtcaacgggtctcagacggtggtcgagcagattgctgacaaagagactggagagttccgcgagaaggtaacgctgggtgagtccgtactggctgcgcagtggctgcaatatggtgttacccgcaaggtgactaagcgttccgtcatgacgttggcgtatggttccaaagagtttggcttccgccagcaagttcttgaggacaccattcagccagctattgacaacggcgagggcctgatgtttacgcaccctaaccaagcggctggctacatggctaagctgatttgggacgctgtgaccgtgaccgtagtggccgctgtcgaggcgatgaactggctgaagtctgccgctaagctgctggctgctgaagtcaaggacaagaagaccaaagaggtactgcgtaagcgctgcgcaatccactgggtaacaccagatggcttcccggtgtggcaagagtaccgcaagcagaaccaagcgcgcctgaagctggtcttcctcggtcaggccaacgttaagatgacgtacaacactgggaaagactcagagattgatgcacacaagcaggaatccggcatcgctcccaactttgtacactcacaggatggtagccacctacgcatgaccgtagtgcacgccaacgaggtctacgggattgactccttcgcgctcattcacgactccttcgggaccattccggcagacgccgggaatctctttaaggcagtccgtgagacgatggtcaagacctacgaggacaacgatgttatcgctgatttctacgaccagttcgccgaccagctgcacgagtctcaactggacaagatgcctgcggtcccggccaaaggtgacctgaatctgcgcgatatcttagagtctgacttcgcgtttgcgtaaggtctcgggcaattagggcacactatagggaaccttcgaatgaccgagggttccattacttaaagtcttaacttaaagaatacttaaagaggcacgccatgacttactcactcgttgtaaccatcttgttaatcatcacccttacactcctcattaacgccatacgcaattcactacgcagcgaggagcgactggagcgcaaggtccgagaggccaactccgcgtttaacaatgagtcctgcaaggtcctgcgactggcagacaaagctgactcgctcagtagacaagttcgctacttagagggagagcttgagagcgagaaacagaaggtgcgcgacgtgaacgaactgctgagccaccagcgggaccgcatgaagttcctccgcaagtcgctgaaggaagcacaagacgagctgatgatggtctccgacctgattcacgttaagttcaccgcagtgttgccggatggcacccactccaagacgctctttaagttaggacttgggccgtgtggtctgcacgttaagtccctacgatggactgagctggcggaccgctatctgatagaccagctgtgcaccaacggtgagcgcaagcagttcacttactttaagtctgaagtggtaggccgaatcgagttccgccacggtaagatgtaattaggacccactatcaggaacatactcaaggtcatcacgtttggtggccttcatgaatgtcccttactatcacaatcaggagcaacaccatgtatcagaacacaatcaactttgagcgcacccgtgaacgtcagcagaccgagggttacatccctaagggccgcaagctgaacaagacgaagcgcggtggtggcgtgaagggttccttccgtaacgcgaagggtgacagcgttgttaaccaagagaaatacttcgtaggagcgtaacaaatggctgagcaaagtaagtatctattcgatggtagcacctcacagtggtctcgcttaggtcatgcagagcgtagactgctggacgagacgatgttaagggtggtcatggcgtaccacacgtggaaccatacagtctctctctcagtatacgcgccgcacccagacggtgacgagctgttagttgagaaatctttcagtcgctggtcgattgactcagcgtcagactggttggctaaactgaccgctgattattcaagctggaagtaattaggacacactataggcagactcaaggtcatcggaatccggtggcctttatgattgcttattgcacactaaatgaacactacacttcggagacatcatcatgatgaacattaagaccaacccctttaaggccgtttcattcgttcgctctgctatcgagaaggcgctggagacttccggttacctcatcgcagacactaagcacgatggtgtacgcgggaacatttgcgtagacaacacggccaacgcagcgtggctcagccgggtctccaagaccattccggcccttgagcacctcaacggtttcgaccagcgctggcagaagttactgaaagatgaccgctggattttcccggatggctttatgctggatggagaactcatggtcaaatgtgcggactttaacaccgggtctggcctactgcgcaccaagtggctcaagaagggaaacatgcagtttgacatcggtggtccatatgaacaatgggagcctgacatgaagggtcagcccttcgcactccacccgaatcacctcaaagttgtactctacgatatcattccgcttgacattatcgagtccggtgatgactacaacgtgatgaccctcctccgccttgagcacgtcaaggttgccttaccagtcctgcaagaccacttccctgaagtcgagtggtgcctctcagagtcccatgaagtttacgacatggacgaactcgatgcgctgtaccgacagaaacgcgaagaaggtcacgaaggtctcgtagttaaggaccctcagggcatctacaagcgcggtaagaagtccggctggtggaaactgaagccagagaatgaggctgacggtgtcgttgtgggactcaactggggaactcccggccttgctaacgagggcaaggtgattggcttcgaggttctccttgagtcaggtcgagtggtgtccgcaaacaacatctctcaggcacttatggatgagttcacgcgagccgtggaggccacagcagaccatcacgaaggttcctacactaacccttacgacggctgggcgtgtcaaatcaagtacatggaggaaactccagacggctctcttcgtcacccgtcgttcgacaaatggcgtggcaccgaagctgacccgaccatcaagatgtaattaggacccactataggagacaccaaatgtctatcaacctgattctaatcatcgtgttcatcctcgcggctatcgtgtggtcaatgaacgacgagccacctaaaggagcataaaccatgcgcttacacttcaacaaatccaacgatatcttctcggttcgccgggaggaccgcagcattgtagctgcctcggagcgacacggtaagattccacgtatcggcgacaccttcgagctggcacctagcgtgcacatcttggttactcgcggtctctacgaattggctcagtctaagagccgtcctttcgtacccgttgtggtaaccaagtggccacgccttcgcctgttctgggagcgcatcaaggaggtggtcaatgaataaggcggaaccatacatcaccctacacgcaagccactgtcgctcggtactatcatttggggcgtgtgactgcggtgctaagcctgcaccagttaaacgacagactgtagacgacggtgttaagcagccgagtcactaccaactgttcgaaggcgtcgaggccatcgaggtgattgcccgcagcatgacccaagagatgttcaaggggtactgcctcgggaacatcctcaagtaccgccttcgtgctggtaagaagtccgagctggctaccttagagaaagacatggcgaaggccactttctatctggagctatacaccaagcacaagggtctgtgttatgacgcctagtgattgtatagaccactgtgttatgacgcctagtgattgtatagaccatggtaagaagggcacctactatagtgcctactgtaagcgactcggtaagaacatcggtctacacagacaggttcttgctgagaagctaggaataaacgtggaggacatggacggtgtggcgatgcacttgtgtgacaacaagcgctgtataaaccctgaccacttagtgttgggcacgcaatctgagaacattctctcagcacactcgaacggtcttgtcccacgtaaccaacctaccaacagactcagtgaggaccttagggtattaatccgtgagagtgacttagggacgcgggagttggctaggagtcttggcatacaccactccacggtaagtaggattcgtaatggaaagtccaagtgagtgggcaagaaagatgtacgagaagacgctcgaccctgcgtacatcaccctgtacaacatgtggaaggagcgagaagatgcaaaagttcgtcgtaacggtcgagacagctaacgcttcgtatgaactcccggtacacgctgggtctcttgaggaggccctcgaagttgccgaggcggagtatgaagagttaggccaagtgactcgggtacgcccggatagtcattaggacacactatagggacacaggttgtccctctttctgttataaaccaaaggagattcatcatggcattcgctaagaagaaaatttacaccactaagattggcacctgtgagccatacgcttacttcaacaagccggactatggcggtgagggttttgagaacccacgcggtacctacaagggttccgtaacgttcaagaacgaagactgtcaggacctcgtggacctcatcgttaagacccatgaggaaaactacgccgctcgtctggaagcgcacgaagcgaacccgccgaaggttcagaagggcaagaaacccctgaagccatacgaaggtgacatgccgttcttcgacaacggtgatggtaccaccacgttcaacttcaagtgctacggttcgtacgaggacaagaagactggcgagaccaagaagattgttctgggcgttgtcgacgctaagggcaagcgcattcaggacgttccgattatcggtggcggctccaaagtgaagattcgcttctcgctggtaccgtacggctggtctgcggtagctggcgcttccgttaagttgcagctggaaggcgtaatgctggtcgaactggctacctttggtggtggcgaagatgactgggctgacgaagccgtagaaggcggttacgaagcggacgaatctcgcagccgtaaacctcaggaagacccggaagactggtctggtgaggaagaggacgagggtgaagccgaagaagatgatgacttctaatggctggatatggagccaaagggattcggaaggtgggtgccttccggtctggccttgaggacaaggtgtccaagcagttagaatcaaagggcgtcacgttcgactacgaattgtggcgcatcccttacgttattcctgcgagtgaccacctttacactccagacttcttgttacccaacggtatcttcgtggagactaagggtctctgggaagccgaggaccgcaagaagcacctattgattcgtgagcaatacccggagttagacatccggttagtgttctcttcgagtcgcactaagatttacaaagggtcaccaaccagttacgctgagtggtgcgagaagcataacatcttgtttgccgacaaattgattcccgtagactggctgaaggagccgaagcgtgatgtaccgttcggcaagttcaagcagaagaaaggagcaaagtaagtatggccaaggttcaattcactaagcgcaaggagacctctcagattttcgttcactgttcggccaccaaggcaaccatgaacgtaggtgtccgtgagattcgccagtggcacaaagagcaaggttggcttgatgtgggataccatttcatcatccgtcgtgatggcaccgtagaggcgggccgcgaccaagatgctgttggttcacacgtcaagggatacaactcgacttctgtcggtgtgtgtcttgttggtggtatcgacgccaagggtaaccctgaggcaaacttcacgccagcccagatgcagtctctgcgttcactgctggtagaactgaaggtgcaatactctggggccgttctgatggcacaccacgacgtagcacctaaagcctgcccgagcttcgacctgaagcgctggtgggagaagaacgaactggtcacttctgaccgtgggtaaacattagggcacactacagggagacaattacgtttccctgttgtcgcacattctgtacaaattatggtcaggcttcaggtgccactgacgtagcgctgcgtttcattcgggttcgattcccggactgaccacaccaacggagattactttatgaacactctcaaagatgtgttaacttctgtactgttgatagctgtaacagcgctggctgtactgtttacggtaatagttgtggtgggtacacttcaatgggtagcatccgtatgagttacggagacagtcaagaagatggtcaggagagtatcttcctgttccacgctccatgcgaaaactgtggttcttctgatggtaactcagtgtactctgacgggcatgagtattgcttcgtgtgtcaacaccgggttcccggctcagaggaacgtaccgaaaagttatcatcgagaagacccaaaggagggaattacgggatgaatacacaaggttcaggcttattggtattcggcgagaatgacggtcggtacactgacctgacggctcgttgtatctcaaaggcgacatgccagaaggctggctattgggtcgccaaggtcagagggaccgcctatcaggtggccgactatcgtgaccagaatggctccatcgtctcccagaagctgcgggacaaggagaagaacttctctaccagagggtctcacaaaggggatgcactgttcggtaagcacctatggaatggtggcaagaagattgtcataaccgagggcgaaatcgacatgttaaccgtgatgcaacttcaggattgtaagtggcctgtggtttctctcggtcacggcgcgtcagccgctaagaaaacttgtagtgcaaactacgagtatttcgatagcttcgaccagattatcctgatgttcgatatggatgagccgggtcgcgcagccgttgaggaagccgctcaggttctccctcccggtaaggtccacgtggccgtgctgaccgagaaggatgccaacgagtgtttactcaaaggcaagggcaaggaggttctcgaccagatatggaacgcagcaccttgggtgcccgatggtgtcatcggtgcgatgtccatgaaggaccgagtgcgagaggccatgaccagtgagcagagcgtcggataccttttctcgggatgtccgggactgaatgaccgaaccttgggtgcacgtggtggcgaagtcatcatggtcacttctgggtcaggaatgggtaagtctacgttcgttcgccaacaggccctagggttcgccagagggcaaggactgcgagttggtatggcgatgcttgaggagtccgtagaggagaccatggaggatgtcctagggattgctaacggcatccgcttacggcagcaacctcgggagttcaagcagaagctgatagaagacgggacgtacgacaaatggttcgatgagctgtacggcaccgaccagttccatctctacgactcctttgcggaagctgaggtggaccgcctgctggctaagctgcactacatgcgcacagggttaaactgtgacgtaatcattctggaccacatctcaatcgtagtgtcggcctcggaggaatccgatgagcgcaagatgattgaccgactcatgaccaagctgaaagggttcgctaagtcaaccggagtggtacttattgttatttgccacctgaagaacccggagaaaggtaaagctcatgaagaaggacgtgctgtttccattactgacctgcgtgggtctgggtctctgcgccagctctctgatactatcattgcacttgagcgtaatcagcaaggggatatgcctaatcttgtcctccttcgtattctcaagtgtcgctttaatggtattggcgttggcattgcagggtacatggagtacaacgaaaagaccggactccttgaaccgtctagctacactggcggagaaggagagggtgatactggctgggaaggacacgaagaagacgactactgagaagtgtcaatgcccagcgtgtgactgggcgtcaccatattgtaaccactgaaaggagaaccaccatgtttaaattaatcgagaagttaggccgtctggtcatcgcactgtacatccgtgaagccaaggcactggacaaagcgtccaaggtggaagcgaaagcagccgctaagctggctaaggcagccgacaaggcacgtcaggcatctctggatgcaaccgcagaggcagctaaagttgcagctaaagctcagaaacttaaggagttcttctaatgactaccaaagctaaattccccggcaacaccattcagctgtccgacactgtagaccagtggggccgcaaggttcacatcaacgtccgcaacgacaaggttactctggtctaccgctggaaggctaagagcgataaccgtgcgcacactcagcgcatgacccttgacgatgtacaggctgctcgactgctggcatccgtagccgtagcagcgactgtggctgtgggtgaagacaaagttcgggaggcgctcctgacaaaagaggtcggcgaaacgtccttatgtctggccgcatcgtcagaagccaagtgataaactcaaggtcattactatatgtagtggcctttatgattatcacacacaacatattggaggaaggttatgaaagtttgttcgaagtgtggcaatggtaagccgctctctgagttcggcaaggcctcccgcatgaaggacggcttgagaacttggtgcaaagagtgtgtgcggaaggataataatgggagataccacaagcaggattcggagcgcagagcagagcacaggtggcgttcccgtaagtcccagataaagaaatacggcatcactgtggaacagtatgaatccatgtgggaagcccaaggagggaagtgtaagatatgcggagacagcatcgcggttcattctgagaatcgccatgaggtagcgtgcatagaccactgccacgagtctttaaaagtcagagggctactgtgttggcactgtaacataggcctaggtaagttctttgatagtgtagagcgccttagggcagccatagaatatctggaggtgcacaatgctggtgatggacattgaagcaaacaacctgctagagaatgtcactcagttccattgcggggttctttatgattatgcaactggggaatacacgtcgtacagaccttgggatttcgaatcgtaccttgacgctatggaggctgaggtggctcgtggtgggcttattgtgggacacaatataaccaagtatgattccccagtgttgaccaagctggccaagctccagttaaaccgagagttccacctgccgcgtgagaacgtagtggacacgttggtacttagccgtttgctttttgcgaacattaaggactccgacatggccctgctgcgttccggtaagttacccggcaagcgcttcgggtctcacgctctggaggcgtggggttaccgcttaggcgagatgaagggtgagtacaaggacgacttcaagaagctccttgaggaacagggtgaggattacgtggacggtgctgagtggattagctttaacgagccgatgatggactataacgttcaggacgttgtggtaaccaaggcgctcttagagaagctactgagtgacagtcactatttccctgaggatatcgaactgtatacccacagctactctatggaacatccgttctggacactctcctgcgaggccgtctggctggaacaccgagccgcttggttactcgctaagcaggagcgcaacggattcccgttcaacaccaaggccattgaggaactctacgttgaactcgcgggtcgtcgttctgaactccttcagacactcaccgacactttcggaacttggtatcaacctaagggcggcactgagttattcctgcacccgcgcaccgggaagcctctgggtaaatacccacgagtgaagtaccctaagcagggtggcatctacaagaaacccaagaacaaagctcaacgtgagggtcgtgaaccctgcgagctggacactcgggattacgtagagggcgctccgtatacgcctgtagagcacgttgtgtttaacccaagtagccgagaccacatcgcgctcaaactgaaggaagccggatggatacctacagagttcaccgaaaagggtgcacccaaggtagacgacgaggtccttgagcatgttcgtgtggaagaccctgagaagcagcgctgtatcgacctcattaaagagtacctgatgatacagaagcgtatcggtcaggcggctgagggcgacaaggcgtggctacgttacgttcaagaggatggtaaaatccatggaagtgttaaccctaatggtgcagttacagggcgagcaacgcatagcttccctaaccttggtcaagttccgggcgttcgttcgccgtatggtgaaccttgtcgagcagcgttcggcgcagagcatcacttggacggacttaccggacagccttgggttcaagcaggcatcgacgccagcggactcgaactccgttgtctggcacacttcatgtctaagtacgacgacggggcatatgcggatgtcattctcaacggtgatatccacacagtcaaccaaacggcggctgagttgccaacacgtgataacgccaagacattcatctacggtttcctctatggtgctggagacgaaaagattggacagattgtgggcgcaggtaaggaacgcggaaaggaactcaagaagaaattccttgagaacaccccagcaatcgcagccttgcgtgaaggaatccagcagaccctcgtcgagtcatcccgatgggttgccggagagcagaaggtcaagtggaaacgacgctggattaagggactggatggaagaaaggtacacgtacggtcaccacatgccgcgctcaacacgttgcttcagtcagcgggtgcgctcatttgtaagctgtggattgtcgagactgaagagttgcttcttaaagcaggattgaagcacggatgggatggcgacttcgcctacatggcgtgggttcacgatgaaatacaagtggcctgccggaccccagagattgcacagcaggtgattgacatagcgcagcaggctatgcgtaacgttggagaccactttaagttccgttgccgtctggatacagaaggtaagatgggtcctaactgggccgtatgtcactaatagtacaggagatttatcatgggtatgaacaaaaagtttcgcgtaacgtttgacgtaacggcgactatgagtaacgagcaggagcaggagttcctcaaggacctgctggaacttgccgattctgtaggcacggacaaacgtcaggcgcacatcgtcaccgaggcaatcaccaacggacacgaggcggcgctcgccttcgttttacagagtggtctgcgtgaagcaatcaaggagcttggcaaggaggtaaactgtgcgtcagttaccgtacgcttctctccggctatcgtgagggtgaccaagtgagtgaatatctcaaagttctggcggccctcaagggctgccctaagtccttccagtcgaactacgtacgtaacaacgctgcgttagtcgctgaggctgcgagccgtggtcacatttcgtgtctgaccatgagtggtcgtaatggtggcgcttgggaaattaccagtgccggagtgaaattccttaagacccatggaggttgcttatgagtaacgttactattagtgcagaccgccttaaatacttagagagtcgggacgaaatcctgagtgctcttgaggaaggtggcgtagataactgggagtggtactcagagtcgttgcagggagcagggcttctggatgaggatgatgaggaggaagacgatgagtaagcacacattgttatccttcagtgactaccgggcaacccagaagattgccaagggtgtcctagtgatggatggtgactggttggtgttccaagccatgagcgccgctgagttcgatgcctcgtgggaggaggagatttggcaccgttgctgcgaccacgccaaggcccgtgagattctggagaactccatcgagtcctacaaaggccgcaagaaggcatggaagaatgccgacgttgtcctagcgttcaccgaccgtgtcaactggcgcaagctgctggtggacccaacgtacaaagagaaccgcgcagtcgtcaagaaacctgtgggttacttcgagttccttgagtctgtctttgagacctacacgtgcgtccttgagccgcagctcgaaggcgatgacgtgatgggtatcattgggtctaaccctctcgtgtacaactacgagaaggccgtactggtctcctgtgacaaggacttcaagaccatcccggattgcgacttcctgtggtgtaccactggtaacatcctcgtgcagactcaggagacagccgactactggcacctcttccagactatcaagggtgacatcaccgatggttacggtgggattcccggatggggcgataccgcagaggacttcctcaaggaacccttcattgtggagcctgtaacgtccgtgctgaagtccggcaagaacaagggccaagaggtaaccaagtgggtgaaacgcgctcctgagccgggagagacgctctgggactgcattaagtccattggtaccaaagcagggatgaccgaagcggaagtaatcaagcagggccagatggctcgcatcctccgttctgatgagtacaacatcgagacgggggagattactctatggcaaccgggcagctgattctcatcgtacttaccatgggcttagtcgcgcgtggtctctggatgttggccttgattatcaagcagatagtcgagcataaagcagagtgataaactcatgggcacaattaggacccactatagggaagtgcccattatgattattacttaaagattacttaaagaggagactcaaatgttaaaacctatagagcacatccttaacaatcccaatgaccttcccgatgtaccgcgagctgtcaaggagtacctacagtctcgcttcaatgccgacttcctgtatcagtcagaggtccgtaagctacgtgaggctggccacagtgaggagttcatctccggggtactgtatggtcactacatggcttctcgtgtccttgacgagatggagggccgtcagcgtgcactcaaagaaggagattgattatgtgtttctcacctaaaatgaaagcacctaaggtcgacacaacgactgtccctgagccagcaccactaaccgaggaacccaagggtatccagtacggtggcgacgaggactcaaacagcaccactcctgaggtgtcagggcgtaagtcactcaaggtgaccaagacgacagaacctacagggtccgtcagtaaaatccgtaagtcagctttaggaggctaacatgggactgttcaagaaaatcaagaaggctatctccaaggtagccaaggcaccactcaaggccgtcggtctagcagcagatgcacctaacgtgcagacagccgcagataccacagtggcagcgcctcaggaagcaccgaaagaggtcgtggaggacgttgaatcttcagcagacactgagtctggtaagaagaaatcccgagcgtctggcaagaagtccctctcagtttcccgcagctcaggcggtgggattaacctgtaaggaggtgacccgtggcagaagttaaactcgaaggcttcgcagaggagggagccaaggcggtatatgaccgtctgaagaacgaccgacaaccttacgagacacgagcagagtcctgtgcgcagtacacgattccctcactgttccctaaggactccgataacgcatcaaccgattacacgactccgtggcaatccgtaggtgctcgcggcctgaacaacctagcgtccaagctgatgctggccctgttcccgatgcagtcttggatgaagttgaccattagtgagtacgaagcgaagaaccttctgggtgacgctgagggtctcgctaaggtcgatgagggcctctcaatggtagagcgaatcatcatgaactacatcgagtccaacagttaccgagtgactctctttgagtgcttgaagcaactgtgtgtggccgggaacgcgctgctgtacttaccggagcctgagggttacaccccgatgaagctctatcgactgaactcatatgtggtccagcgagacgccttcggtaacgtactccagattgtcactctcgacaagattgcgttcaacgctctccctgaggacgttcgcggccaagtggaagcagctcaaggtgagcagaaggaagacgctgagattgacgtctacacccacgtgtacctgaatgaagccggggatggctactcgaagtacgaagaggttgccgaagaggtagttccgggaagtgaagccgagtacccactcgaagagtgtccgtacattccggtacgcatggtccgcatcgacggtgaatcctatggtcgttcctacgtggaagagtatctgggtgacctcaagtccctagagaacctacaagagtccatcgtgaagatggccatgattaccgctaaggttatcggtctggtagacccggcaggtatcactcaggtccgccgactcacggcagcacagtctggtgcgttcgtaccgggccgtaagcaggacattgagttcctccagctggagaagtccggtgactttaccgtagcgaagaacgtaagcgacaccattgaggctcgcctctcgtatgcctttatgctcaacagtgcggtacaacgtactggcgagcgagtcacagccgaagagattcggtatgtggcgtcagagctggaagataccttaggtggtgtctactcgattctctcgcaggaactccagctgcctctggtaagagtgctcttgaagcaactacaagccacgcagcaaatcccggagttacctaaagaggccgtcgagccaactatcagcactggccttgaggctatcggacgtgggcaggaccttgacaagctggagcgctgtattaacgcatggtcggcccttaaggccctcgaaggtgatgatgacctcaacttggctaacctcaagttacgtatcgctaacgctatcggactcgacaccgctggtatgcttctcactcaggagcagaagaacgcccttatggcacagcagggtgctcagattgctactcagcaaggggccgcagcgctgggtcaagggatggccgcacaggctactgcaagtcctgaagcgatggccgcagcggctgattcagtcggtatgcaaccgggcatgtaattagggcacactatagggagacacatccagattgaatgaggtctggtcagaaggttcgagtccttcgtgtttccctcttagtcttaactttaaggagattgaaatggctggcgaatctaacgcagacgtatatgcatccttcggtgttaacagtgctgtactgactggtagtacacctgaggagcaccaagaaaacatgttggctcttgatgttgctgcccgtgatggcgatgatgcaatcgagctgaacaccaacagtgatgacccgtatggctccgatgtggacccgttcggtgaacctgaagagggccgtatgcaggtccgcatctccgctgacggttcagacgaacaggaaggcgaagagggtcagggcgacgaagaacagcagggcgacgaagagggtcagctggaggaagtaaccgacgatggtgaacctgaagagttcaaaccgattggtgaaactccggctgacatcaacgaagcctctcagcagctggaagaacacgaagctggctttaacgacatggttgccactgcaatcgaacgcggtctctcacaggatgctgtgacccgtattcagcaggagtaccagaacgaagaccgcttgtccgaggagtcttacaaagagttggccgaagctggctacagtaaggcgttcgtcgatgcgtacattcgtggtcaggaagctctggtcaaccagtacgtcgagaaggtgatggacttcgtgggaggccgtgagcgcttccagcaggtctacagccacatgcagaccaataaccctgagggtgccgaggcgctcatcaaggcttttgagtcccgtgacgtagccaccatgaagacgattctgaacctagcgggacagtctcgtgataaaacctttggtaagaaagctgagcgctctattgccaagcgtgcaaccccagcgaaacctgtggcccgcaaggctgaaggcttcgagtctcaagctgagatgattaaggcgatgtccgacccgcgctaccgcaccgactctaagtatcgtcgtgaggtggaacagaaggttatcgactctaagttttaattagggcccactatagggagagacagatagttcctctcggtctgaccgatgtcttggtctgtcctcccgcttcgagttacacaatgagtatcacctcgtttcaagtagtacctcaaaacatttcgtataaacaacataaggagattcaacatggctaacatgcaaggtggacagcagctcggtactaaccaaggtaaaggtcaatccgcagcagacaagctggcgctattcctgaaagtattcggcggtgaagtcctgaccgcattcgctcgtacctctgtgaccactaaccgtcacatgcagcgtcaaatcagctccggtaagtccgcacagttccctgtgattggtcgcaccaaggctgcttaccttcaaccgggcgagtctctggatgacaaacgtaaagacatcaagcacaccgagaagaccattaacattgatggcctgctgaccgctgacgtgctgatttacgacatcgaagacgcgatgaaccactatgacgtgcgctccgagtacacctctcagattggtgaatctctggcgatggcggctgatggtgcggttctggctgagctggctggtctggttaacctcgctgattccgtcaacgagaacatcgctggtctgggcaaaccgtccctgctggaagttggctctaaggctgacctgaccgacccggttaaactgggccaagcggttatcgcacagctgaccattgctcgtgcagctctgaccaagaactacgtcccggctaacgaccgtacgttctacaccaccccggacgtgtactctgcgattctggcggctctgatgcctaacgctgcgaactatgcggctctgattgaccctgagcgtggttctatccgtaacgtgatgggcttcgaagtcgttgaggttccgcacctgaccgctggtggtgctggtgatgaccgccctgacgaaggcgcagaagcgaccaaccagaagcacgctttcccggcaactggtggtaaagtcaacaaagagaacgttgtgggcctgttccagcatcgttccgctgttggtaccgtcaagctgaaagacctcgctctggaacgtgctcgccgcgctgagtatcaggctgaccagattatcgctaagtacgcgatgggtcacggtggtctgcgtccagagtctgcgggtgcgctggttttcacggcggcctaagcgtaaatacctttagtgctcgggtggtaactccacctgagtacgaggtacagactgtggctattgctggtgattcacttaaggtgacacttgatgggctggaaggagtgacggactggtcaagccttgaggtaacctatggtacttcagggattgccagccacactcgccgtaccaacacgctgtacttcaaaggaatcgctgtaggcgaaactctagtgactgtcagctttgacgggtctgaaatgaagtcctttaagctggtcgtgactaactaataagccaaaccccttggggaccactcacggtctctgaggggttttttcgttaggagcttacaatatgaacatgcaagatgcttactttgggtctgccgctgagctggatgctgtcaacgagatgcttgcagctatcggtgaatcccccgtgaccacccttgacgaagatggtagcgcagacgtagcgaacgcccgtcgaatcctcaacaggattaaccgccagattcagtccaaaggttgggccttcaacatcaacgagtcggccacattgacccctgataccagcactgggcttatcccgttccgtccggcctacctgtctatccttggtggccagtacgtgaaccgtggtggttgggtgtatgacaagtccacagggacagataccttctctggggcaatcacagtgaccctgattactcttcaggattacgatgagatgcccgagtgtttccgccagtggattgtcaccaaggccagccgtcagttcaactctcggttcttcggagcggaggacgtagagaactcgctggcacaggaagagatggaagcacggatggcgtgcaacgagtacgagatggacttcgggcagtacaacatgcttgacggtgacgcatacgtacaaggtctcatcagtcgttaatcagaaacctaaggaggaccaaatggctctcgtatcacaatcaatcaagaacctcaagggaggcattagccagcagcctgaaatcctacggtaccccgagcagggttcacttcaggttaacggttggtcctccgagactgagggtctccagaagcgaccacctatggtgttcatcaagtccttgggaggccgtggatatcttggtgaggacccctacattcacctcatcaaccgtgacgaatacgagcagtattacgcggtgttcactgggaatgacgttcgggtgttcgacctgtccggctatgagtatcaggtccgtggcgaccgctcttacgtgaccgtcaataaccctaaggataacttgcggatggtcacagtggctgactacacgttcatcgtgaatcgtaccagacaggtccgagaaagtcagaacttgaccaacggtgggaccttcaaggataacgtggacggtatcattaacgtccgtggtggccagtatggccgtaagctggaagtgaacattaacggcgtctgggtaagccaccagctacctccgggtgacaacgctaaggatgacccacccaaggttgacgcacaggccatcgctgaggccctagctgttcttcttcgcacggctcaccctacgtggacgttcgatgttggaacagggttcatccactgtatcgccccagcgggtaccactctggatgtgttcgaaacgaaggatggttacgcagaccagctaatcaatccagtaacccattacgtccagagcttctctaagttgccgctgaacgccccagatggttacatggtgaagattgttggggacacatccaagaccgccgaccagtattacgttaagtacgacaagagtcagaaggtctggaaggaaactgtaggttggaacatctcagtcggccttgagcaccacacgatgccttggacactggttcgtgcagctgacggtaactttgacctgagctaccacgagtggaaggaccgtcgagctggtgacgatgatacaaaccctcagccatcctttgtgaactcgacgataactgacgtgttcttcttcaggaaccgcttagggttcatctctggagagaacattgtgatgtcccgtaccagtaaatactttgagttctacccgccgtctgtggccaactacacggatgatgacccgctggatgttgctgtgagccataaccgagtgtcggtccttaagtacgctgttagcttcgctgaggagctgctgctgtggtccgatgaggcgcagttcatcctgtcagcaaacggagtgttatccgctaagacagcccagctggacctgaccactcagtttgatgtatctgacagagcgcgcccttatggtatcggtaggaatatctactatgcagcacctcgcagctccttcacgtccatcatgcggtactacgcggtacaggatgtgagctctgtgaagaacgcagaggacatgacggcccacgtcccgaactacattccgaacggtgtgtacagcatcaacgggtctggtacggagaactttgcgtgtgtgctgaccaagggcgctcccagtaaggtattcatctacaagttcctctacatggatgaggacattcggcagcagtcgtggtcccactgggacttcggggagggtgttgaggtgatggctgcaaactgcatcaactctacgatgtacatgctgatgcgtaatggatacaacgtgtggattgctgctgtggacttcaagaaggagtcgactgacttcccgttcgagccttacaggttccacgtggacgccaagcggtcttaccacatctcagagacagcgtacgacgttgaaacgaaccagacggtagtgaacgtcaaggacatctacagcgcgtcgttctctaatggcactgtggcaatctgcgagagtgacggtaaaatcaccacgtatgagccgatgggtgactcttgggattcaaccccagacatccgcattagcggtgacatctcgggcaaggatatcgtcattgggttcctgtacgacttccaatatgtattcagtcggttcctcatcaagcaggagcagaacgacggcacaacgtccactgaggacgctggacggctacagctgcgtagagcttgggtgaactatcagaacaccggagcgttcactgtgagcgtcgacaatggtagccgtgagttcaactatctggtcaacgccagagttggttctacaggtctacgtctgggacagaaggccacaactactggtcaataccgattcccggtgaccggcaacgccttgtaccagaaggtgtccctgagttccttcaatgcttccccggtgtcaatcattgggtgtggctgggagggtaactacatgagacgtgccaacggtatttaactgaaggaatccttatggtgtgctcaattagggcacactatagggaggccacactaagaggggacttaaagcatgtacattagaaacactgtaagtaatgacttcgagttattcatcccggcctaccatgacgtacttgaggcacaggccatgggtatagaaccatcgttcccagcggttactgagtgtgtcacgttagaccacgatggttttcctttggctataggtggacattgtggagaccaatgctggttcgtcacgagtgaccaagtgtggagactcgacagggctggcaagctggagttccgtgagagaatcatggagtacagggacatgttattagatgtctatccatccctgtggaactttgtgtgggtcggtaatggtcctcacaagcgcttccttaagtccatcggtgcggtattccatgaggagtacactcaggatggcaagtttcaactgttcaccataactaggaggtaactatgtgctggatggcagcaataccgattgcaatagcagcggcgcagtctgtaggcaacgctcggaatgccgctaaggccactgggttacagaacgaccagatgcgccgacagtctgcccagatgattaaagagtcaaacattcagaacgctaacgccagccttgagcagaaacagaagctcgaagaggcaagcgctgagttatccgctaagaatctcgataaggttcaggccatgggtacaatccgtgcagccatcggagagggtaaccttgagggagctagtatggaccgcatccagcgaatcgaagagggcaagttcatccgggaagccaatgcggtcaccgataactaccgccgagactatgcgtcactcttcgctcaacagcttggcaactctgagtccactatggaccaagtgaaggccatgcagaaggctgaaggtaaaggtaagtctaagctggagcaggtactagacccgctggccattatgggttcacaggcagcgtcctcgtatgcttccggtgcgttcgacagtaagtccaccaaggccccaataagtcaggcccaaggtaccaaggtaggaggtaagtaatggctagtaaattagaacaagcattgagccaaatgccacaggccgggtctactcgtatccgtggtggtgcagcgtccatgcagtatcgcccagtgactatccaacaggaaggagcccgacagtctaacctagtgcaatccttagcgaagttcgggacagctatgggtgaggcgtacgatgcatacgacaagcgccagcgcgataaggccgatgagcggtccgatgagattatccgcaagttgaccccagagcagcgccgggaggcaatcaagaacgggaccctgctgtatcaggatgacccgtacgccatggaggccctgcggttcaagacaggccgtaacgctgcgttcctcattgacgacgaagtggcgcagaaggttcagaacggtgagttccgcactcgtaccgagatggaagagtatcgccacaagcggttgaccgaaggtgccaacgagttcgctgaacagttcatgattaaccctgaggactctgagttccagagagggttcaacgcgaacatcactgagcgcaatatctcgctgtacggtaagcacgatacgttcctgagcgagcaagcccagaagggtgccatattggcctcgaaggttgagctgtcaggcgtgcttaaagacccagccgttctggctcgcccagagtccggtgagttcttccaacgctacattgacaattcgcttaagacaggtagtatccctagcgacgctcaggcccagcaggtcatcatcgggtcccttaacgacgtcattcagcgtccgggtgctaccaacttcttgcagagccttgagggccgtccggtcacccttaacgggaagaccacgacctataaggaactgatgggtgaggagcaatggaacgccctgatggtcaaggcccagtcgactcagttcgacaatgacgctaagttgtctgaaggtttccgcctcgggattaccagcgcgttgaaccaagacgacaccagcaagggctgggagatgcttcagggtgccaaagcggaacttgaccgtctacagcccggtgagcagatgaccccagagcgtgagcgtttgattcaggctgaggagcaaatgcaggcccgtttccgtcaggaggcccaagcgaaagccaaggagatggacaagcggcagaagaccatcaacaagaatcaggtaatcgaccagcagtttaccaagcgtatcaacggtcagtacgtgtccaccagctacaaggatatgccgaccaacgagaacaccggagagttcactcacagtgacatggtgaactacgctaacggtaagctggctgagattgaccagatgcagctcacggagcaacagaaggaccgcatgaagctgagctacctccgggcagactcagagggtggagccttccgtaccgttgtgggccagatggtaaccgacgctgggtctgaatggtctgccgctgtgattaacggtaagttaccagaggataccacagcgttgaacaaactgcgcaccatgcgtaacaccgacccggacctcttcgctgcactgtacccggacaaggctgacttgttcctgacgatggacatgatggacaagcagggcattgacccgcagattctcatagacgctgaccgttctcgccgcagtctcaccaaagagatgcagtacgaggatgataaagcgtgggcgtccctgaagaacaactcagagtccccagagctgtctcgcattccagctagtctggacggtatggcccgtaagatttacgacagcgtcaagtaccggacaggtaacagcgacatggcaatgcagcagaccgataagttcctcaaggaatccactgtgactttcaaaggtgacgacgtggacggtgataccattggtattatcccgaagaacatcctacaggtcagtgatgacccacgcagctgggagcagggccgggacatcctcgaagaagcccgtaagggaatcatcgcggctaacccttgggtgaccaacaagcagctgacgatgtaccagcagggtgactctatctacatgatggacaccactggcactgtccgcatccgctacgacaaggagctactgactcgaacctatcaggaacagcagcagcgactggccaaggaagccgaagagaaggcacttaaggaagcaaccaaacgtgcacctatctccgcagccactcaggcccgtaaggcagctggtgagcgcgtccgtgcgaaacgtaaagccactccgaagttcatctatggaggtggcgatgagtaaacaataaggagacaacatgagctacgttaagtccaaacccagcgactacgatggtatcttccagaaggcagcagactcccacggtgttagctatgacctcctgcgtaagttatcgttcaatgaatcatccttcaaccctaaggccgtctctaagactggccctaagggcatcatgcagttcacccgcaacacggcccgagctatgggccttaacgtgaccgatggtgacgacgatgggcgctacaaccctgagttagccattgacgcaggcgctaagctacttgcgagtctcgttaagaagtacaacggggatgagcttaaagcggccctagcgtacaaccaaggggaaggcccagcaggagcaccccagcttcaggcttatgataagggcgacttcgggtccatctcggaggaaggtcgcaactacatgcgcaagctgcttgacgtagccaagagtcctcagtctggtgctcttgaagcgttcggtggcatcaccccaaagggtaaagggattcccgcagaggatgccttcaagggtatcgctaagactggcaaagttggtactgagctgccggagtcccacgggttcgacattgagggtgtagcgcaggaagcaccaaacactccatacgctaaggacttctgggagaagaccgggactactctcgatgagtataactctcggtccaccttctttggcttcgggaatgctgcgagtgcagaactccagaactcgaccttaggtgtagctttccgtgctgcgcgggctgacgatgggtacgatgtgttcaaggacacgatgaccccgactcgctggaactcttatgttccctccaaggaagacctacagaagctgcgcgactctgggctacctccgagttactacggtgtggtgactggtggtgacggtgagaactgggacgcactcataaagctggccaaggataacttcgaggctgaccaacgggccgctgaggctggtactggtgcgaaactcgctgctggtatcgttggtgctggtgtggacccgctcagctatgttcctctggtcggtgtggccgggaagggactcaaggtggtcaataaggccctgcgagtaggcgcacaggctggggcacttagcgttgcctctgagggaatccgtacgtcagtagctggcggtgaagctcactacgctgatgctgcacttggcgggttactgttcggtgctggtatgtcggctctcagtgacgctgtggctgctggtatccgtaaggcccgtggcgttgagtctgtgaatgagttcgctgggccagcactccgtatggaagcacgagagactgccatcaacactggcggtcacgacacctcgacactacctccagagaacttctcgttcgagcaggaccacagaggtgttccgtttgctgaccacccgaacgaagagggcgcagtggttcttgccaatggttccatcctgagcgataccaacccgcttaacccaaggactcaacgtgacttcgcagagattgacccagagcgtgcagctcccggtatcaagctcggtgggttcactgagattggcctgaagaccttagggtccaaggatgctggtgttcgtgcaatagctcaggacctcgtgcgctctcccacaggtatgcaatcagggtctagtggtaagttcggtgcgaccgcttcggacattcatgagcggctccatgcgactgaccagcggatgtataaccagctgtatgacgctgttgaccgtgccatgaaggacccagagttctccgtgggtgagcagaagatgtcgcgtagagctatccgtcaggaagtctacaagcgtgcggccttggcgattgagcgtccagagttacaggctgatttgaccaaaggtgaacgtgaggtgatggacctgctgaaagagcacttcgacaccaagcgtgagctgatggaacagccgggtatcttcggtaacgctaacgccgtgagcatcttccccggtagtcgacacaagggtacctacgttcctaacgtgtacgacaggggtgctaaggaactgatgatgcagaagctgggcggacctgaaggactccaacaggcaatcgctcagagctggcttaccagttaccgagtgcgacctgaggtcaaggcacgtgtcgacgagtacctgatggaactcaacggctacaagtcggttgaccaagtgacacctgaggtggtccagaagcacgccatggacaaggcgtacggtatcagccacacagaggacttcacggcatctagtgtcattgatgacaacatcacaggtctagtcggtatcgagaacaactcgttccttgaggcccgtaacatgttcgacagcgacctcccggttaccttaccggatgggtcaacattcagcgtcaacgacctgagggacttcgacatggcacggattatcccggcgtacgaccgtcgagttaacggtgatatctccatcatgggcggtagtggcaagaccacgcagcagctcaaggacgaaatcatggcgttagacaagcgggccgaacgtaagggacaactgaagggtgaagtggaagcactgaaggacaccgttaagattctcactggacgtgctcgtcgtaacaacgatacagcctttgagaccgccatgcgtaccctgaatgacctagcgttcttcgctaagaacttctacatgggtccgcagaacctcacagagattgctgggatgttggctaagggtaacgttaaggcgatgctccacggtatcccgacgttgcgtgacctagccaccagaacctctccggtgtcaggtagtgaactccgtgaactccatggggcattgttcggtaaggaacttgaccagttaatccgtccgggacgtgaggacatcgtgcagcgaatccgtgaggcttccgataccagtggggccatggcgtcagtcattggtaccatcaagttcggtactcaggagctgtcggctcgttctccttggaccaagatgctgaacggtacggctaactacattctggacactgcccgtcagggtgtgctcggtgatgtggctggtgcggccctaggcggtaagggttccaagtttggcaaagagaacttcctcaaagctgcctctatcagtcctgagcagtggaagggaatcaagcaactctttgtcgaccacgcgactcgtgacgctaacggtcagttcaccatcaaggacaagaaggctttcgctcaggacccaagagcgatggacctgtggcgtcttgccgataaggttgccgatgagaccatgctgcgccctcacaaggtatcccagcaggattccaaggcgtacggtgcgggtgtcaagatggctatgcagttcaagaacttcaccatcaagtcactcaacgccaagttcattcggtccttctacgagggctacaagaacaaccgcgctatcgacatggcgttgacccacgtgttgtctctgggtatcgccgggacctactttgcgatgcaggctcatgtgaaggcttacggcctccaagagtctcagcgtaaggactacctgaagaaagccctgaacccgaccatgctgagctacgcagcgttgactcgaagttcccacactggtgccccgctgtctatcctttcgatgatggctggtgccgctgggtatcaggatgccaacatgctgcgctctacaatcttaccgaaggaggaacagttccagaagaaagacaaggcagcacagggtcgtaccgaggcgtctgactttgcgggtaacttaggttctcaggttccagcactgggttacatcgggaacgttgtggctaccgctaagaatgcttatggtgttgctacagcgcccaataagccgactgagcgtgactacatgactggcctgatgaactccactaaggagcttgtacccaacgacccactcacccagcagctcgtgatgaaaatctacgaagccaacggtgtgaccatcaagcagcagccaaagcctaactaattaggacacactatagggagaccgattggtttcccttctcattcaacttaaggaggtcacgatggaccaagaaattaaaacagtcatccagtatcctacagggtccactgagtttgacatcccgttcgactacctgtcccgtaagtttgtccgcgtatcactggtgtctgacgacaaccgcagactgctgagtaacataaccgagtaccgatacgtgtctaagaccagagttaaactgctggtagcaaccactggtttcgaccgtgtggagattcgacggttcacatcggcgtcagagcgagtggtagacttcagtgacggttctgtattacgagccaacgaccttaatgtctcgcagctacagtctgcacatatcgctgaagaagcccgtgatgctgcactgctggcaatgccggaggatgacgctggtaatctcgacgcccgtaaccgtaagattgttagactggctcccggcgaggatggaacagatgcaattaataagaatcagctcgacacaactctgggtgaagctggtggtattctgtcggatgtgcttactgctcagaaagagttctatgagtatctaactaatttcgctacggacaccgctatggtgcgtggagtgagctgggtgtacaaccaagggtctgcggttggtggcgagactatcatcacaattgataagacagagcgtgtatacgcggtcccattcattgaggtgaatggtagtcgtcaagaggtcggatatcactttgagttcgacgcgctgctccagagaatcaccttagcgaaaccactggttgctggtgacttcctgatggcaatgaccactgagagtaacatcccgttagaggacatgctggcctcagctgctggtgcttctaacattgggacatcgtctggtgagactgttcagaagattctggacggtgtaactcagctgattccttcagtggacgatttggaagctgtaggtaaggccaatggtcgccgggtgcgcaccgtgggttattacaccgggactaacgctggtggcggtctgtacacgtacaatgagtctcgtaagaatgagaacgacggtgtgacagttattaacggctgggtacgttcatttgacaacgtccgctatgtaagtgatgctggtattgttgctgggatggcacccactgaggttgcacgccgactgaacatcctactgtccactgcaaagcgtggctgcacgtttgatggtgagggaatcccgctgactacctcaacccacattcggttactcaatacggacaacgttgaagtgcgggcgatgcgcatcactggggacaaggccacatggaccttcgttaataacgaccgtggtgtattccttgcgaatacctgtcattaccttgagattcacgggtgtgagttcgtaggagtccgtatgtcgcagccaaataccccaatcacctctaccatcacggctacaggtcgtattcaggatggtgacgctgggattgagctgaagacctgtaacgactccaatgtgcatcacaactacgttcgcggcgttaagacttggggcatcctgagcactaacggtacccgtccgacagttcgtaagaacctcgtggttagctgtgcgcgtcagtcaggtgtctctgtgtcaatcggtaccacatttgacgtggacgatgggactgttgcggataaccgaatctaccttgtgggcctgtatggtatcgaggttgagaagtggaccaagcaatgtaaccgcctgagcgtctacggcaacgttgtgtccgaggcacagtatggtatccacgctgtcgggcttatccgtggcatgaacgcattcgataaccgcattggtggatgtcgctacgcaatggcagggaccagcctcaacgcatcactgggttcagagatgaacgcgcggaacttcttcaagtccaacgtgtgtattagtaactatgcaggcattgccccgtcgaactccttctatgtgacctacgcgaacaacctcgtaaacggatggcgcgatacggactacttcgtcaatgacccttacgacaccgtagagattgtggcctcagctaactctttctactcactgcgtaatctggatgttggcaagaagctgctcattaacgggaccgagtgtactgtgcagtcaagcaccgcgagtacagaccctgcgattgtcgctaagattggtctgtccacagtgtacctcattgtgtgcgataagctgccagcaggtctggaggatttcactccattcaagactcaggtgaccgccactacctcttacggttactggccgttctatcagaagaacacgggcgaccacctcattgataatacctttgagaacgtccgctatggcttctaccagacagctcaggctaccgagaataacgactgctgggccactggtaccaagttcgttaacgtgtcggtacctgtagctggtggggcgtggggtatcgaggtgagcaagtccaccttcatcaactgtcagcgctataccgacagtgccaacaaggtgaccttgaaccagctgggcctgtccgctctggctaccgtgggccatcctactgcggtcactgggtcggaaactaagcctactgtgacgttctacaactttgctaatgacatcgtggtacgcttccgtctgcgtgcttccaacgtatcgtggacaacagaagcctccagtatcaaccttgcgattaaccttaacggttcttccgtaggttacattcaggttacctctaagggtgccagcgtggatgggttcgttgacctgctgaacggtggacttctgcctaagggtgccaataccttacgtgttattgataccactggttccctgtcgtttgataactggtacattgagatgttcgttgcaagctaacttaaggagatttgcatgttaaacaatctgaatcagccgaaaggctcaaccattggtgtgctcagggatgggcgcaccgtccaagaggctattgacgagcttgagaagattaagactcgcaatgtagaccctgagcgtttccgtgagacgttgacgtcgagcgacgatgaggtatttgataagctgttcgagtggttagccactcagtcagacgttgttggtacagctagttcctcctatatcatagccctaccgcgcatgattgaccttaacggtcgtacctacacactgactaagcgtcacgtattggatggtaacttcggtattcagaacggtactatcctgatgtccggtgagggtgagattatcatgggcctcgacacaggtactaagactcgccgtcacttccttaagtatgtacatttcgagtacatcggggaatccgaccgaagcacctctctggtaaccatggcacgatgcttcaactctgtggtgctattctgtaacttcattgctggtggtgataccgctcgcaacagagcgccgcgcacccgttacggcctgttcgcagggtccaccagatgctggggcttccagttaatcggtggtgagtattatggcggtgactgtgcgttgcgtgttggacgcgctaacgaccacactgggctgaccattcgtcccggtacagttcaccactctcgtgttatcaacatgctactgtgtaacccggcaggtgcagaggtgtctggctgtaacattgaacacgcagacaacggtgcggttggtttagggattacctcaggtacaaacacctcaggtaacgcagcccatggtgttcgcatcaatggtgtgtacttctacaataacggtaacggctccagtggctcaaacgtagcacctgcgaatatcctcattggtaaggacattccgggaaccgaaggttgggacagaccgggcgagttgattacgtcaagtcaaaacacagcgcacagcattacggtatcagagtgctacatcgttagtccgaacacccagaacgcttggcaggttaacgccctgtacagtgtgtccttcttggataacaaagtgggactcaaaggtgacgctacgattcacggtgtgtacgacggtacgtgtgctaactgctgggctgtaggcaaccgagaccaaggcggcaaggtgttccagttctcctctacagcaaccaacacgattctgactacccgcaaaggtaagtggactccgaagattatcggtgagggcacggcaggtaacactacactgagtgcttctggcggtgcgtactctctggataatggaatggtaaccgtatcgtgcttcgcggtggtaggtactaaggaccctaacatggctgggaacctgaacatcaaactcccagtagcctgtgaggaccagcagcgaggtggtaacggaatttctctgactaacatccccgacgtatcgagtcctaacgggagtgttataatcatcggggataccgctcgaatcatgctagggtctgcgaggttgcggcccgagaacatcacaactggcactgctatccacttctcagtgtcataccccgccgatgttaaggtataaggaggtatcatgttatccctagacttcaacaacgaagttatcaaggcggctcccattgcgggggtcgctggggccgatggcgtagcgaggctcttctggggtctctcactcaatgagtggttctacgtcgcggcaatcgcctacacagtggttcagattggtgccaaggtagtcgacaaaatcattgactggaagaaagctaataaggagtaacctatggacctgattaagttcctcgaaatgttagacactgagatggcccagcagatgctcatggacctgaaggaccctgaacgtcgaagccctcagctgtacaacgccattggtaaactgctggagcgccacaagttccaaatctctaagctgacccctgacgtcaacatcttgggcggactggctgagggtctggaggcttacaactccaaggtgggcgctgatggcctgacagacgacgataagttcaccctacagtgatatactcaaggtactactatatgtagtgcctttatggatgtcattgcactacgctaggcgttcctacgtgaaatctgagaaacaacgggaggcattatgctggagttcacaaagagaatcgtcccgtatcttgtggctatcatggtgtttgccttcgggtggcacttggggtcacaatctacggacgctaaatggaaggaggtagtacagaatgaatacgttaagaagcaaacggctagagctgaaactcagaaagcgattgacgcagtatcggctaagtaccaagcagaccttgaggggctggagggcagcactgataggattattgctgatttgcgtagcgacaataagcggctgcgcgttaaagtcaaacctaccagtgtccccgcaggaccagacggtcgatgcctcgttgatggttccgtcgaactacacgaagcaactgctcgaagtcttatcgcaataacccagaaggccgaccttaaagagaaggccctacaggatacaattcgtaagctgcaagggaaaggaggtgaacattgagcaactctcagcaagccaagaacgccttaatcattgcgcaactgaagggtgactttgtcgcctttctcttcgtgctctggaaggccctgaacctgccggaaccaaccaagtgtcaaatagacatggccaagtgtctggcgaacccaaagaacaagaagtttatccttcaggctttccgtggtatcgggaagtcgttcatcacgtgtgcgttcgtagtgtggaccctgtggcgtgaccctcagttaaagatactgattgtctcagcctcaaaggaacgtgcggacgctaactccatcttcatcaagaacatcatcgacttgttgcctttcctgagtgagcttaagcctcgccccggtcagcgtgactccgtgattagctttgatgtaggccctgccaagccggaccacagcccgtcagttaagtctgtgggtattacgggtcagctcactggtagccgtgccgatatcatcattgcggatgacgtggagattcccggtaactctgcaacccaaggtgcccgagagaaactctggacgttggttcaggagttcgccgcactgttgaaacctctgccgactagccgtgttatctatctgggtacccctcagaccgagatgacgctctacaaggaacttgaggacaaccgtgggtactcaacgattatctggcctgcacagtatcctcgctccaaagaggaggacctgtactatggtgaccgactggccccgatgctccgtagcgagtacgatgaggacaaagagggtctcagcagtcaaccaactgacccggttcgattcgactcaatggaccttcaggaacgtgaggtggaatacggcaaggctggctatacgcttcagttcatgctcaacccgaacctcagtgacgccgagaagtacccgctacgcctccgtgatgctatcgtgtgcggtctacaggcggacaaggccccaatgcattaccagtggctcccgaaccgtcagaaccgcaatgaggagcttcctaacgtgggtatgaagggtgacgagatttactccttccacacagcctccagtaacactggcgcgtatcagggtaagattctggtcattgacccaagtggtcgcggtaaggatgagactggctggtgtgtgctgtacaccctcaacggttacatctacctgatggacgctggtggtactcgcggttacgaagagaagtcccttgagttcctcgctaagaaagccaaacagtggcaggtgcagactgtggtctttgagagcaacttcggtgacggtatgttcggtaacgtgttccagcctgtgctcctgaagcatcacccatcgcaactcgaagagattcgtgctcgtggtatgaaagaggtccgtatctgcgatacccttgagcctgtactggcaagtcaccgcttggtcatccgtgatgaggtaattcgacaggactaccagacggcacgtgatgcagacggtaagcacgctctgaagtacagcctgttctaccagatgacccgtatgagccgtgagaagggcgctgtggcacacgatgaccgacttgatgcgttagcattgggtgtcgagttcctacgctctacgatgcagcaggacgctgtgaagatagaggctgaggtacttcaggagttcttggagcaccacatggagaagcccctaagtaacatctcccagttccgggctaccagtagcaacggtgtggacatccgatgggaagacgagggggatgacactatgttcatcgcatggtgattatgcagggattgtgcataaggattcattaggccacggaaggccacttaatgaaaacttcaggtataacagacacttggaattagggcccactatagggagagacccttgaagacttactataagactacttaaagtttcattcatatagttatgcacttaaagtctccttacagatagagggtagtgatgataatatcaccctctcaccataagacactaagagccaacataaggaggacctatgcgcttattgttaaccttactgcgccataggactacttggcgatttctgcttgtacttgctggtgcccttggggctacactggttactcagcagcaactcagtggactggagactctcgtgtgctctctactcacttgtagcgattagggtcttcctgacgcgctagggattccgtagtgatgcttatcagcatacaccactccatccctctacagtcaatacttaaagttaaccttatgtaccgcccttgggtctacctacggtaagcaccgtacctgaggaagtacctgaggttacctttaagaattttacacaaagttctgagtggatatctcacagtttaaactttcagtactccccccggtggccctccagtcaccttcagttcaccttaggtaccccctcctttaaccttaggattaccttgggtggtaccttgggttgacctgagggatactatatgttgtggtgtgggagaccttaggacactatatgttgatgtctctgtgtccc

SEQ ID NO: 5 - DNA, 40307 bp, Unknown
  source: /note="Description of Unknown: KP3W-P0105 Bacteriophage sequence"
tatctgttggccctctttaagtaacaacctgaggtcatacctgaggtatccaccttaggacctcctgaggccatacctgagaccatataccttaggttaacggtgagtcatccggtgagtcatcactataaggctattgggtagtcattgtcaattcattctattaggacacactatagggagacacttaaagaggactaatagaatgcgacaagataataaatctaagacacttatagacatcataatgactcactctaagatgacagatagtggttgtatggtatggagaggtagaactaatagtaatggctatgggtctatcctgtggatgggtagaactcaattagtacaccgattggtatatgaggagtatcgggactatagcctaaggccgggacaagtggtaagacatatgtgtgacaatccacgatgtgtcaatccgggtcatctagtggtaggtagtcaggctgataacatggcggataaacttataaataaagtgttgacaccggagggaggtttcgttatagtgtgaatcgtcaaggcgacacgggaaaccggatagctaagacgccacggtcaagtggttaagtagacagcctgataagtcatacgaaaaacaggtattgacaagcagtataaacatcaagtagtatagcgtcactgattgagagcagtaacctctcaaggttcattaacaatatggattagtcaaagctgatatgttcaccatgacattagtgtttaactagtggttacattcgggtctctggcaaggtacgtcctgtcaccctgagagtaaccacactgataaccactaacatcgaggatatacaccatggaacgtaacgctaacgcatactatgaccttctggctgcaactgttgagctgttcaatgagcgcatccaacaggatgaactcaccgaggatgatgattggtctgatgcactgcacgaggtggtagacgggcaggttccgcactattacagtgagattttcacagtgatggcagccgatggtatcgaccacgagttcgacgactcaggactcatcccagacaccaaggacgtaagccgcatctgtcaggctcgcatctatgaggcgctgtacaacgacgtcttgaatgactctgggattgtctggtatgaagctgacgaggacgaggaggactgtgatgattgagtatggtctcactaggcaggacatgcacgaataccgcagcgcctttaagacggcctgcgagtgcactgctggcatacctgaagcaaaagccgactggttcggctactacatggcccagctggctcaaacttatcgcacacgcaaggtaatgtatgctgaccctattcgtaattagtgtgtacgccctgattgtcctgtactttgtgcgggactttcgtaagggtctcaaggtacacaaagcatctttcagttacatgaagtggggcttcttgcctcgctttactgtacgtctacctaatggccgttttaaggctaacaaagtggggatattctatgtcgcaacgcactaacctgaagaaagccttcaagattgcacggatggtgatgccatacggtgccggggagaagcggacaaggagaatacttgcggtaagggctggaagattaccagctaggcaccgcaaatgggtaatgcagcaggtctacgtggagttgtatcaccctcagcggataccggatggctacatacggtcgcctataggctggaaacgagtagcaactaactaaaccactgacacacgcaccacaaggaaacaacctaatgaactacaccgacatgcaagaacgcttagacgtcatccgtaacctgccaatctgtgaactcgacaagcgccagccactgctggtagcactcatcgctgacattgtgaactacgagacgtccgatggtgacgatacggacagcgattgtggccttgagcgtcaggactattggcaaaccctgaagattaaggccaaagacgctgggtttaacctgctgggcaacggtcacttcagcgcagcgtttaagcacgcactactgccgggcaaggtcattaaggttggctttaagaaagaggactcaggggccgcctacgtggctttctgccggatgcaccaaggccgggtagggatacctaacgtctatcacgtagcgcgtcacgctagctgctatacggtggtacttgatgagctggaaccatgccagcggcgagagaacgagacgcacgagcattacgcggacctagcgaattactttgtggagaactctggtgcagagctgggggatgttgacggtgcagagaaggaattaccattcatcgagacatgcaagatgattaacaagttcttccatggtatcgcatccttcgatatgcacagcggtaacatcatgttcaccaaagacggcaagccagtgattactgacccggtgtcattctcagcggaccgggaccgtgagcctttctcactggaacctgaggagctactcgtagagattgagcagatagcacacgccaagatgattgaacgctgtaagcgcaacaaggctaagcgagaccgtgacagcacgctgtgtcgcgcccgtagggccaacaacaaggcacgccgtaaggcctacaaggcacacgctaggtggcgtaaggagcgcgagcggattaacgctgaggccctaaagtatgacctagcgcaaatcgagcagcgagtgcacgcatggatggcttgtgatggtctcgccatacagcagggtcgggtccttcaggtggacaactaccttcagggtagacttatgggttagcaaggtgtatcttaggtgtctccgatacgaggcaccaatagataaactttattcacaaagaggcacacaatgaacgcattaaacattgcacgtaatgacttctcagagattgaacttgccgctattccgtacaacatcctcagcgagcactatggggacaagttggcacgtgagcagctggcccttgagcacgaatcgtacgagctgggcgagcagcgtttcctgaagatgctggaacgtcaggtcaaagccggggagttcgctgacaacgtggccgctaagccactggtcttaacgttgcacccacagctgaccaagcgtattgacgactggaaggaggagcaagcaaacgctcgcggtaagaagccccgcgcgtactacccgattaagcacggtgttccctctgagttggcccttagtatgggcgctgaggtgctcaaggagaagcgcggagtgtctagtgaggcaatcgcactgctaaccattaaggtagtcttagggacgctaacagacgcctctaaagccaccatccagcaggtatcctcacagttaggcaaggcccttgaggacgaggcccgcttcggccgtatccgtgagcaggaagccgcctacttcaagaagaacgtagcggaccagctggacaagcgcgtaggtcacgtgtacaagaaggcattcatgcaggtcgtcgaggccgatatgatttccaaagggatgcttggtggtgacaactggtccagctggaaaactgacgagcagatgcacgtagggaccaagctgctggagctgcttatcgaggggactggtctggtggaaatgaccaagaacaagatggctgatggctccgatgatgtgaccagtatgcagatggtccagctggctccggcctttgtggaactcctgagcaaacgagcgggcgcactcgcaggtatcagcccgatgcaccagccgtgcgtagtccctccgaaaccttgggtggaaaccgtaggaggtggctactggtcagtcggtcgccgtccgttggcactggtgcgcacccactccaagaaggcactacgtcgctacgatgacgtgcacatgcctgaggtatacaaagcggtcaacctcgcgcaaaacacaccgtggaaggtcaacaagaaggtgctggcggtagtcaacgagattatcaactggaagcactgcccggtaggtgacgtcccggcgattgaacgcgaagagttaccaccacgaccggatgatattgacaccaacgaggtggcacgtaaggcgtggcgcaaggaggccgcagctgtctaccgtaaggacaaggcccgacagtctcgccgtttgtcaatggagttcatggttgcacaggccaacaagttcgctaaccacaaggccatttggttcccgtacaacatggactggcgcgggcgtgtgtacgctgtgagcatgttcaacccgcagggtaacgacatgaccaagggtatgctgacactggccaagggcaagtcaatcggtctcgacgggttctactggctgaagattcacggtgcaaactgcgcaggcgtcgacaaggttcccttccctgagcgcatcaagttcatcgaagagaatgaaggtaacattctggcaagcgcagcggacccactgaataacacttggtggaccaagcaagattcaccgttctgtttcttagcgttctgctttgagtatgcgggcgttaagcatcacggcctgaattacaactgctcgctgccgctggcgttcgatgggtcctgctctgggattcagcacttcagcgcaatgctccgcgattccatcggtggccgtgccgtgaacctgctgccttctgataccgtgcaggatatctacaagattgtggccgacaaggttaacgaggtgctccaccagcatgcagtcaacgggtctcagacggtggtcgagcagattgctgacaaagagactggagagttccgcgagaaggtaacgctgggtgagtccgtactggctgcgcagtggctgcaatatggtgttacccgcaaggtgactaagcgttccgtcatgacgttggcgtatggttccaaagagtttggcttccgccagcaagttcttgaggacaccattcagccagctattgacaacggcgagggcctgatgtttacgcaccctaaccaagcggctggctacatggctaagctgatttgggacgctgtgaccgtgaccgtagtggccgctgtcgaggcgatgaactggctgaagtctgccgctaagctgctggctgctgaagtcaaggacaagaagaccaaagaggtactgcgtaagcgctgcgcaatccactgggtaacaccagatggcttcccggtgtggcaagagtaccgcaagcagaaccaagcgcgcctgaagctggtcttcctcggtcaggccaacgttaagatgacgtacaacactgggaaagactcagagattgatgcacacaagcaggaatccggcatcgctcccaactttgtacactcacaggatggtagccacctacgcatgaccgtagtgcacgccaacgaggtctacgggattgactccttcgcgctcattcacgactccttcgggaccattccggcagacgccgggaatctctttaaggcagtccgtgagacgatggtcaagacctacgaggacaacgatgttatcgctgatttctacgaccagttcgccgaccagctgcacgagtctcaactggacaagatgcctgcggtcccggccaaaggtggcctgaatctgcgcgatatcttagagtctgacttcgcgtttgcgtaaggtctcgggcaattagggcacactatagggaaccttcgaatgaccgagggttccattacttaaagtcttaacttaaagaatacttaaagaggcacgccatgacttactcactcgttgtaaccatcttgttaatcatcacccttacactcctcattaacgccatacgcaattcactacgcagcgaggagcgactggagcgcaaggtccgagagaccaactccgcgtttaacaatgagtcctgcaaggtcctgcgactggcagacaaagctgactcgctcagtagacaagttcgctacttagagggagagcttgagagcgagaaacagaaggtgcgcgatgtgaacgaactgctgagccaccagcgggaccgcatgaagttcctccgcaagtcgctgaaggaagcacaagacgagctgatgatggtctccgacctgattcacgttaagttcaccgcagtgttgccggatggcacccactctaagacgctctttaagttaggacttgggccgtgtggtctgcacgttaagtccctccgctggacagagctagatgaccgctatctgatagaccagctgtgcacaaacggtgagcgcaagcagttcgtctactacaagagcgaagtagtaggtcgcatcgagttccgccacggtaagatgtaattaggacccactatcaggaacatactcaaggtcatcacgtttggtggccttcatgaatgtcccttactatcacaatcaggagcaacaccatgtatcagaacacaatcaactttgagcgcacccgtgaacgtcagcagaccgagggttacatccctaagggccgcaagctgaacaagacgaagcgcggtggtggcgtgaagggttccttccgtaacgcgaagggtgacagcgttgttaaccaagagaaatacttcgtaggagcgtaacaaatggctgagcaaagtaagtatctattcgatggtagcacctcacagtggtctcgcttaggtcatgcagagcgtagactgctggacgagacgatgttaagggtggtcatggcgtaccacacgtggaaccatacagtctctctctcagtatacgcgccgcacccagacggtgacgagctgttagttgagaaatctttcagtcgctggtcgattgactcagcgtcagactggttggctaaactgaccgctgattattcaagctggaagtaattaggacacactataggcagactcaaggtcatcggaatccggtggcctttatgattgcttattgcacactaaatgaacactacacttcggagacatcatcatgatgaacattaagaccaacccctttaaggccgtttcattcgttcgctctgctatcgagaaggcgctggagacttccggttacctcatcgcagacactaagcacgatggtgtacgcgggaacatttgcgtagacaacacggccaacgcagcgtggctcagccgggtctccaagaccattccggcccttgagcacctcaacggtttcgaccagcgctggcagaagttactgaaagatgaccgctggattttcccggatggctttatgctggatggagaactcatggtcaaatgtgtggactttaacaccgggtctggcctactgcgcaccaagtggctcaagaagggaaacatgcagtttgacatcggtggtccatatgaacaatgggagcctgacatgaagggtcagcccttcgcactccacccgaatcacctcaaagttgtactctacgatatcattccgcttgacattatcgagtccggtgatgactacaacgtgatgaccctcctccgccttgagcacgtcaaggttgccttaccagtcctgcaagaccacttccctgaagtcgagtggtgcctctcagagtcccatgaagtttacgacatggatgaactcgatgcgctgtaccgacagaaacgcgaagaaggtcacgaaggtctcgtagttaaggaccctcagggcatctacaagcgcggtaagaagtccggctggtggaaactgaagccagagaatgaggctgacggtgtcgttgtgggactcaactggggaactcccggccttgctaacgagggcaaggtgattggcttcgaggttctccttgagtcaggtcgagtggtgtccgcaaacaacatctctcaggcacttatggatgagttcacgcgagccgtggaggccacagcagaccatcacgaaggttcctacactaacccttacgacggctgggcgtgtcaaatcaagtacatggaggaaactccagacggctctcttcgtcacccgtcgttcgacaaatggcgtggcaccgaagctgacccgaccatcaagatgtaattaggacccactataggagacaccaaatgtctatcaacctgattctaatcatcgtgttcatcctcgcggctatcgtgtggtcaatgaacgacgagccacctaaaggagcataaaccatgcgcttacacttcaacaaatccaacgatatcttctcggttcgccgggaggaccgcagcattgtagctgcctcggagcgacacggtaagattccacgtatcggcgacaccttcgagctggcacctagcgtgcacatcttggttactcgcggtctctacgaattggctcagtctaagagccgtcctttcgtacccgttgtggtaaccaagtggccacgccttcgcctgttctgggagcgcatcaaggaggtggtcaatgaataaggcggaaccatacatcaccctacacgcaagccactgtcgctcggtactatcatttggggcgtgtgactgcggtgctaagcctgcaccagttaaacgacagactgtagacgacggtgttaagcagccgagtcactaccaactgttcgaaggcgtcgaggccatcgaggtgattgcccgcagcatgacccaagagatgttcaaggggtactgcctcgggaacatcctcaagtaccgccttcgtgctggtaagaagtccgagctggctactttagagaaagacatggcgaaggccactttctatctggagctatacaccaagcacaagggtctgtgttatgacgcctagtgaatggtgccgagcgatgtacgagaagacgctcgaccctgcgtacatcaccctgtacaacatgtggaaggagcgagaagatgcaaaagttcgtcgtaacggtcgagacagctaacgcttcgtatgaactcccggtacacgctgggtctcttgaggaggccctcgaagttgccgaggcggagtatgaagagttaggccaagtgactcgggcacgcccggatagtcattaggacacactatagggacacaggttgtccctctttctgttataaaccaaaggagattcatcatggcattcgctaagaagaaaatttacaccactaagattggcacctgtgagccatacgcttacttcaacaagccggactatggcggtgagggttttgagaacccacgcggtacctacaagggttccgtaacgttcaagaacgaagactgtcaggacctcgtggacctcatcgttaagacccatgaggaaaactacgccgctcgtctggaagcgcacgaagcgaacccgccgaaggttcagaagggcaagaaacccctgaagccatacgaaggtgacatgccgttcttcgacaacggtgatggtaccaccacgttcaacttcaagtgctacggttcgtacgaggacaagaagactggcgagaccaagaagattgttctgggcgttgtcgacgctaagggcaagcgcattcaggacgttccgattatcggcggcggctccaaagtgaagattcgcttctcgctggtaccgtacggctggtctgcggtagctggcgcttccgttaagttgcagctggaaggcgtaatgctggtcgaactggctacctttggtggtggtgaagatgactgggctgacgaagccgtagaaggcggttacgaagcggacgaatctcgcagccgtaaacctcaggaagacccggaagactggtctggtgaggaagaggacgagggtgaagccgaagaagatgatgacttctaatggctggatatggagccaaagggattcggaaggtgggtgccttccggtctggccttgaggacaaggtgtccaagcagttagaatcaaagggcgtcacgttcgactacgaattgtggcgcatcccttacgttattcctgcgagtgaccacctttacactccagacttcttgttacccaacggtatcttcgtggagactaagggtctctgggaagccgaggaccgcaagaagcacctattgattcgtgagcaatacccggagttagacatccggttagtgttctcttcgagtcgcactaagatttacaaagggtcaccaaccagttacgctgagtggtgcgagaagcataacatcttgtttgccgacaaattgattcccgtagactggctgaaggagccgaagcgtgatgtaccgttcggcaagttcaagcagaagaaaggagcaaagtaagtatggccaaggttcaattcactaagcgcaaggagacctctcagattttcgttcactgttcggccaccaaggcaaccatgaacgtaggtgtccgtgagattcgccagtggcacaaagagcaaggatggcttgatgtgggataccatttcatcatccgtcgtgatggcaccgtagaggctggccgcgaccaagatgctgttggttcacacgtcaagggatacaactcgacttctgtcggtgtgtgtcttgttggtggtatcgacgccaagggtaaccctgaggcaaacttcacgccagcccagatgcagtctctgcgttcactgctggtagaactgaaggtgcaatactctggggccgttctgatggcacaccacgacgtagcacctaaagcctgcccgagcttcgacctgaagcgctggtgggagaagaacgaactggtcacttctgaccgtgggtaaacattagggcacactacagggagacaattacgtttccctgttgtcgcacattctgtacaaattatggtcaggcttcaggtgccactgacgtagcgctgcgtttcattcgggttcgattcccggactgaccacaccaacggagattactttatgaacactctcaaagatgtgttaacttctgtactgttgatagctgtaacagcgctggctgtactgtttacggtaatagttgtgatgggtacacttcaatgggtagcatccgtatgagttacggagacagtcaagaagacggtcaggagagtatcttcctgttccacgctccatgcgaaaactgtggttcttctgatggtaactcagtgtactctgacgggcatgagtattgcttcgtgtgtcaacaccgggttcccggctcagaggaacgtaccgaaaagttatcatcgagaagacccaaaggagggaattacgggatgaatacacaaggttcaggcttattggtattcggcgagaatgacggtcggtacactgacctgacggctcgttgtatctcaaaggcgacatgccagaaggctggctattgggtcgccaaggtcagagggaccgcctatcaggtggccgactatcgtgaccagaatggctccatcgtctcccagaagctgcgggacaaggagaagaacttctctaccagagggtctcacaaaggggatgcactgttcggtaagcacctatggaatggtggcaagaagattgtcataaccgagggcgaaatcgacatgttaaccgtgatgcaacttcaggactgtaagtggcctgtggtttctctcggtcacggtgcgtcagccgctaagaaaacttgtagtgcaaactacgagtatttcgatagcttcgaccagattatcctgatgttcgatatggatgagccgggtcgcgcagccgttgaggaagccgctcaggttctccctcccggtaaggtccacgtggccgtgctgaccgagaaggatgccaacgagtgtttactcaaaggcaagggcaaggaggttctcgaccagatatggaacgcagcaccttgggtgcccgatggtgtcatcggtgcgatgtccatgaaggaccgagtgcgagaggccatgaccagtgagcagagcgtcggataccttttctcgggatgtccgggactgaatgaccgaaccttgggtgcacgtggtggcgaagtcatcatggtcacttctgggtcaggaatgggtaagtctacgttcgttcgccaacaggccctagggttcgccagagggcaaggactgcgagttggtatggcgatgcttgaggagtccgtagaggagaccatggaggatgtcctagggattgctaacggcatccgcttacggcagcaacctcgggagttcaagcagaagctgatagaagacgggacgtacgacaaatggttcgatgagctgtacggcaccgaccagttccatctctacgactcctttgcggaagctgaggtggaccgcctgctggctaagctgcactacatgcgcacagggttaaactgtgacgtaatcattctggaccacatctcaatcgtagtgtcggcctcggaggaatccgatgagcgcaagatgattgaccgactcatgaccaagctgaaagggttcgctaagtcaaccggagtggtacttattgttatttgccacctgaagaacccggagaaaggtaaagctcatgaagaaggacgtgctgtttccattactgacctgcgtgggtctgggtctctgcgccagctctctgatactatcattgcacttgagcgtaatcagcaaggggatatgcctaatcttgtcctccttcgtattctcaagtgtcgctttaatggtattggcgttggcattgcagggtacatggagtacaacgaaaagaccggactccttgaaccgtctagctacactggcggagaaggagagggtgatactggctgggaaggacacgaagaagacgactactgagaagtgtcaatgcccagcgtgtgactgggcgtcaccatattgtaaccactgaaaggagaaccaccatgtttaaattaatcgagaagttaggccgtctggtcatcgcactgtacatccgtgaagccaaggcactggacaaagcgtccaaggtggaagcgaaagcagccgctaagctggctaaggcagccgacaaggcacgtcaggcatctctggatgcaaccgcagaggcagctaaagttgcagctaaagctcagaaacttaaggagttcttctaatgactaccaaagctaaattccccggcaacaccattcagctgtccgacactgtagaccagtggggccgcaaggttcacatcaacgtccgcaacgacaaggttactcttgtctaccgctggaaggctaagagcgataaccgtgcgcacactcagcgcatgacccttgacgatgtacaggctgctcgactgctggcatccgtagccgtagcagcgactgtggctgtgggtgaagacaaagttcgggaggcgctcctgacaaaagaggtcggcgaaacgtccttatgtctggccgcatcgtcagaagccaagtgataaactcaaggtcattactatatgtagtggcctttatgattatcatacacaacatattgaggagttacaccatgcgtaaacccgaagagattcgtaaagagattgaagcgctgaacaaagagctggctgaggccaagacctatgaggccaagcgtgacgctgctgttcacattctggagaaccttgggtggacccacagtggtcacaagggctggcagagacctaaggatggaccgaaagtatccgactacaaggccccactgaaggctggcgagctggcaacgtgggaggacggtaacattggtggaaccgtatatatccgtagcgtaggtaacaaattctctcaggtgtctcacgtccgtggccttagtcgtctgggtgttgacgtccttacgggcagcttcgccgttgagaacagtaagttaaccatccgtccgcgtgagtatttcctcgggcgtcgctaagtaacaggagaccactatgttagtaaccgatattgaggctaacaacctcttagagaaagtcactcagttccactgtggggtcatctatgactacagcacggacgagtacgcatcgtatcgaccttgggacttctcagcgtatctcgatgcgttagaagctgaggtggctcgtggtggtctcatcgtattccacaacggtcacaagtacgatgccccagtgttgaccaagctggccaagctccaattaaaccgagagttccacctgccgcgtgagaacgtagtggacacgttggtacttagccgtttgctttttgcgaacattaaggactccgacatggccctgctgcgttccggtaagttacccggcaagcgcttcgggtctcacgctctggaggcgtggggttaccgcttaggcgagatgaagggtgagtacaaggacgacttcaagaagctccttgaggaacagggtgaggattacgtggacggtgctgagtggattagctttaacgagccgatgatggactataacgttcaggacgttgtggtaaccaaggcgctcttagagaagctactgagtgacagtcactatttccctgaggatatcgaactgtatacccacagctactctatggaacatccgttctggacactctcctgcgaggccgtctggctggaacaccgagccgcttggttactcgctaagcaggagcgcaacggattcccgttcaacaccaaggccattgaggaactctacgttgaactcgcgggtcgtcgttctgaactccttcagacactcaccgacactttcggaacttggtatcaacctaagggcggcactgagttattcctgcacccgcgcaccgggaagcctctggggaaatacccacgagtgaagtacccgaagcagggtgccatctacaagaaacccaagaacaaagctcagcgtgagggccgtgaaccctgcgagctggacactcgggattacgtagagggcgctccgtacacaccagtagagcacgttgtgtttaacccaagtagccgagaccacatcgcgctcaaactgaaggaagccggatggatacctacagagttcaccgaaaagggtgcacccaaggtagacgacgaggtccttgagcatgttcgtgtggaagaccctgagaagcagcgatgtatcgacctcattaaagagtacctgatgatacagaagcgtatcggtcaggcggctgagggcgacaaggcgtggctacgttacgttcaagaggatggtaaaatccatggaagtgttaaccctaatggtgcagttacagggcgagcaacgcatagcttccctaaccttggtcaagttccgggcgttcgttcgccgtatggtgagccttgtcgagcagcgttcggcgctgagcatcacttggacggacttaccggacagccttgggttcaagcaggcatcgacgccagcggactcgaactccgttgtctggcacacttcatgtctaagtacgacgacggggcttatgcggatgtcattctcaacggtgatatccacacagtcaaccaaacggcggctgagttgccaacacgtgataacgccaagacattcatctacggtttcctctatggtgctggagacgaaaagattggacagattgtgggagcaggtaaggaacgcggaaaggagctcaagaagaaattccttgagaacaccccagcaatcgcagcgttgcgcgaaggaatccagcagaccctcgttgagtcatcccgatgggttgccggagagcagaaggtcaagtggaaacgacgctggattaagggactggatggaagaaaggtacacgtacggtcaccacatgccgcgctcaacacgttgcttcagtcagcgggtgcgctcatttgtaagctgtggattgtcgagactgaagagttgcttcttaaagcaggattgaagcacggatgggatggcgacttcgcctacatggcgtgggttcacgatgaaatacaagtggcctgccggaccccagagattgcacagcaggtgattgacatagcgcagcaggctatgcgtaacgttggagaccactttaagttccgttgccgtctggatacagaaggtaagatgggtcctaactgggccgtatgtcactaatagtacaggagatttatcatggctattaccaagcgtgtacatgtaagttttgatgctaagttggtactgtctaccgaagacgtcgagaagattgctaaagacctagtggtggcttccaagggtttccttgagggtaagccaacagatggtcgcaagctggctggtatcgaggctgctgtaactgatgggccggaggcagcaatcgagctggcactgaagggcatcataacccaagagcttaagtctttattgaacgagatgaagttcaactccttcggtaacttccgagtggggttcaagcaatgagcgagtacctaaaagttctggcggccctcaagggctgccctaagtccttccagtcgaactacgtgcgtaacaacgctgcgttagtcgcggaggctgcgagccgtggtcacatttcgtgtctgaccatgagtggtcgtaatggtggcgcttgggaaattaccagtgccggagtgaaattccttaagacccatggaggttgcttatgagcaagcacacattgttatccttcagcgactaccgggcaacccagaagattgccaagggtgtccttgtgatggatggtgactggctggtgttccaagccatgagcgccgctgagttcgatgcctcgtgggaggaggagatttggcaccgttgctgtgaccacgctaaggcccgcgagattctggagaactccattgaatcctacaagggccgcaagaaggcgtggaagaatgcagacgttgtcctagcgttcacagaccgtgtcaactggcgcaagctgctggtggacccaacgtacaaagagaaccgcgcagtcgtcaagaaacctgtgggttacttcgagttccttgagtctgtctttgagtcctacacgtgcatccttgagcctcagctcgaaggcgatgacgttatgggaatcatcgggtctaaccctctcgtatacaactacgagaaggccgtactggtctcctgtgacaaggactttaagaccataccggactgcgacttcctgtggtgtacgactggtaacatcctcgtgcagacgcaggagacagccgactactggcatctcttccagactatcaagggtgacatcaccgatggttacggtggcatccccggttggggcgataccgcagaggacttcctcaaggaacccttcattgtggagcctgtaacgtccgtgctgaagtccggcaagaacaagggccaagaggtaaccaagtgggtgaaacgcgctcctgagccgggagagacgctctgggactgcattaagtccattggtgccaaagcagggatgaccgaagcggaagtaatcaagcagggccagatggctcgcatcctccgttctgatgagtacaacatcgagacgggggagattactctatggcaaccgggcagctgattctcatcgtacttaccatgggcttagtcgcacgtggtctctggatgttggccttgattatcaagcagatagtcgagcataaagcagagtgataaactcatgggcacaattaggacccactatagggaagtgcccattatgattattacttaaagattacttaaagaggagactcaaatgttaaaacctatagagcacatccttaacaatcccaatgaccttcccgatgtaccgcgagctgtcaaggagtacctacagtctcgcttcaatgccgacttcctgtatcagtcagaggtccgtaagctacgtgaggctggccacagtgaggagttcatctccggcgtactgtatggtcactacatggcttctcgtgtccttgacgagatggagggccgtcagcgtgcactcaaagaaggagattgattatgtgtttctcacctaaaatgaaagcacctaaggttgacacaacgactgtccctgagccagctccgctcactgaggaacccaagggtatccagtacggtggcgacgaggactcaaacagcaccactcctgaggtgtcagggcgtaagtcactcaaggtgaccaagacgacagaacctacagggtccgtcagtaaaatccgtaagtcagctttaggaggctaacatgggactgttcaagaaaatcaagaaggctatctccaaggtagccaaggcaccactcaaggccgtcggtctagcagcagatgcacctaacgtgcagacagccgcagataccacagtggcagcgcctcaggaagcaccgaaagaggtcgtggaggacgttgaatcttcagcagacactgagtctggtaagaagaaatcccgagcgtctggcaagaagtccctctcagtttcccgcagctcaggcggtgggattaacctgtaaggaggtgacccgtggcagaagttaaactcgaaggcttcgcagaggagggagccaaggcggtatatgaccgtctgaagaacgaccgacaaccttacgagacacgagcagagtcctgtgcgcagtacacgattccctcactgttccctaaggactccgataacgcatcgaccgattacacgactccgtggcaatccgtaggtgctcgcggcctgaacaacctagcgtccaagctgatgctggccctgttcccgatgcagtcttggatgaagttgaccattagtgagtacgaagcgaagaaccttctgggtgacgctgagggtctcgctaaggtcgatgagggcctctcaatggtagagcgaatcatcatgaactacatcgagtccaacagttaccgagtgactctctttgagtgcttgaagcaactgtgtgtggccgggaacgcgctgctgtacttaccggagcctgagggttacaccccgatgaagctctatcgactgaactcatatgtggtccagcgagacgccttcggtaacgtactccagattgtcactctcgacaagattgcgttcaacgctctccctgaggacgttcgcggccaagtggaagcagctcaaggtgagcagaaggaagacgctgagattgacgtctacacccacgtgtacctgaatgaagccggggatggctactcgaagtacgaagaggttgccgaagaggtagttccgggaagtgaagccgagtacccactcgaagagtgtccgtacattccggtacgcatggtccgcatcgacggtgaatcctatggtcgttcctacgtggaagagtatctgggtgacctcaagtccctagagaacctacaagagtccatcgtgaagatggccatgattaccgctaaggttatcggtctggtagacccggcaggtatcactcaggtccgccgactcacggcagcacagtctggtgcgttcgtaccgggccgtaagcaggacattgagttcctccagctggagaagtccggtgactttaccgtagcgaagaacgtaagcgacaccattgaggctcgcctctcgtatgcctttatgctcaacagtgcggtacaacgtactggcgagcgagtcacagccgaagagattcggtatgtggcgtcagagctggaagataccttaggtggtgtctactcgattctctcgcaggaactccagctgcctctggtaagagtgctcttgaagcaactacaagccacgcagcaaatcccggagttacctaaagaggccgtcgagccaactatcagcactggccttgaggctatcggacgtgggcaggaccttgacaagctggagcgctgtattaacgcatggtcggcccttaaggccctcgaaggtgatgatgacctcaacttggctaacctcaagttacgtatcgctaacgctatcggactcgacaccgctggtatgcttctcactcaggagcagaagaacgcccttatggcacagcagggtgctcagattgctactcagcaaggggccgcagcgctgggtcaagggatggccgcacaggctactgcaagtcctgaagcgatggccgcagcggctgattcagtcggtatgcaaccgggcatgtaattagggcacactatagggagacacatccagattgaatgaggtctggtcagaaggttcgagtccttcgtgtttccctcttagtcttaactttaaggagattgaaatggctggcgaatctaacgcagacgtatacgcatccttcggtgttaacagtgctgtactgactggtagtacacctgaggagcaccaagaaaacatgttggctcttgatgttgctgcccgtgatggcgatgatgcaatcgagctgaacaccaacagtgatgacccgtatggctccgatgtggacccgttcggtgaacctgaagagggccgtatgcaggtccgcatctccgctgacggttcagacgaacaggaaggcgaagagggtcagggcgacgaagaacagcagggcgacgaagagggtcagctggaggaagtaaccgacgatggtgaacctgaagagttcaaaccgattggtgaaactccggctgacatcaacgaagcctctcagcagctggaagaacacgaagctggctttaacgacatggttgccactgcaatcgaacgcggtctctcacaggatgctgtgacccgtattcagcaggagtaccagaacgaagaccgcttgtccgaggagtcttacaaagagttggccgaagctggctacagtaaggcgttcgtcgatgcgtacattcgtggtcaggaagctctggtcaaccagtacgtcgagaaggtgatggacttcgtgggaggccgtgagcgcttccagcaggtctacagccacatgcagaccaataaccctgagggtgccgaggcgctcatcaaggcttttgagtcccgtgacgtagccaccatgaagacgattctgaacctagcgggacagtctcgtgataaaacctttggtaagaaagctgagcgctctattgccaagcgtgcaaccccagcgaaacctgtggcccgcaaggctgaaggcttcgagtctcaagctgagatgattaaggcgatgtccgacccgcgctaccgcaccgactctaagtatcgtcgtgaggtggaacagaaggttatcgactctaagttttaattagggcccactatagggagagacagatagttcctctcggtctgaccgatgtcttggtctgtcctcccgcttcgagttacacaatgagtatcacctcgtttcaagtagtacctcaaaacatttcgtataaacaacataaggagattcaacatggctaacatgcaaggtggacagcagctcggtactaaccaaggtaaaggtcaatccgcagcagacaagctggcgctattcctgaaagtattcggcggtgaagtcctgaccgcattcgctcgtacctctgtgaccactaaccgtcacatgcagcgtcaaatcagctccggtaagtccgcacagttccctgtgattggtcgcaccaaggctgcttacctgcaaccgggcgagtctctggatgacaaacgtaaagacatcaagcacaccgagaagaccattaacattgatggcctgctgaccgctgacgtgctgatttacgacatcgaagacgcgatgaaccactatgacgtgcgctccgagtacacctctcagattggtgaatctctggcgatggcggctgatggtgcggttctggctgagctggctggtctggttaacctcgctgattccgtcaacgagaacatcgctggtctgggcaaaccgtccctgctggaagttggctctaaggctgacctgaccgacccggttaaactgggccaagcggttatcgcacagctgaccattgctcgtgcagctctgaccaagaactacgtcccggctaacgaccgtacgttctacaccaccccggacgtgtactctgcgattctggcggctctgatgcctaacgctgcgaactatgcggctctgattgaccctgagcgtggttctatccgtaacgtgatgggcttcgaagtcgttgaggttccgcacctgaccgctggtggtgctggtgatgaccgccctgacgaaggcgcagaagcgaccaaccagaagcacgctttcccggcaactggtggtaaagtcaacaaagagaacgttgtgggcctgttccagcatcgttccgctgttggtaccgtcaagctgaaagacctcgctctggaacgtgctcgccgcgctgagtatcaggctgaccagattatcgctaagtacgcgatgggtcacggtggtctgcgtccagagtctgcgggtgcgctggttttcacggcggcctaagcgtaaatacctttagtgctcgggtggtaactccacctgagtacgaggtacagactgtggctattgctggtgattcacttaaggtgacacttgatgggctggaaggagtgacggactggtcaagccttgaggtaacctatggtacttcagggattgccagccacactcgccgtaccaacacgctgtacttcaaaggaatcgctgtaggcgaaactctagtgactgtcagctttgacgggtctgaaatgaagtcctttaagctggtcgtgactaactaataagccaaaccccttggggaccactcacggtctctgaggggttttttcgttaggagcttacaatatgaacatgcaagatgcttactttgggtctgccgctgagctggatgctgtcaacgagatgcttgcagctatcggtgaatcccccgtgaccacccttgacgaagatggtagcgcagacgtagcgaacgcccgtcgaatcctcaacaggattaaccgccagattcagtccaaaggttgggccttcaacatcaacgagtcggccacattgacccctgataccagcactgggcttatcccgttccgtccggcctacctgtctatccttggtggccagtacgtgaaccgtggtggttgggtgtatgacaagtccacagggacagataccttctctggggcaatcacagtgaccctgattactcttcaggattacgatgagatgccagagtgtttccgccagtggattgtcaccaaggccagccgtcagttcaactctcggttcttcggagcggaggacgtagagaactcgctggcacaggaagagatggaagcacggatggcgtgcaacgagtacgagatggacttcgggcagtacaacatgcttgacggtgacgcatacgtacaaggtctcatcagtcgttaatcagaaacctaaggaggaccaaatggctctcgtatcacaatcaatcaagaacctcaagggaggcattagccagcagcctgaaatcctacggtaccccgagcagggttcacttcaggttaacggttggtcctccgagactgagggtctccagaagcgaccacctatggtgttcatcaagtccttgggaggccgtggatatcttggtgaggacccctacattcacctcatcaaccgtgacgaatatgagcagtattacgcggtgttcactgggaatgacgttcgggtgttcgacctgtccggctatgagtatcaggtccgtggcgaccgctcttacgtgaccgtcaataaccctaaggataacttgcggatggtcacagtggctgactacacgttcatcgtgaatcgtaccagacaggtccgagaaagtcagaacttgaccaacggtgggaccttcaaggataacgtggacggtatcattaacgtccgtggtggccagtatggccgtaagctggaagtgaacattaacggcgtctgggtaagccaccagctacctccgggtgacaacgctaaggatgacccacccaaggttgacgcacaggccatcgctgaggccctagctgttcttcttcgcacggctcaccctacgtggacgttcgatgttggaacagggttcatccactgtatcgccccagcgggtaccactctggatgtgttcgaaacgaaggatggttacgcagaccagctaatcaatccagtaacccattacgtccagagcttctctaagttgccgctgaacgccccagatggttacatggtgaagattgttggggacacatccaagaccgccgaccagtattacgttaagtacgacaagagtcagaaggtctggaaggaaactgtaggttggaacatctcagtcggccttgagcaccacacgatgccttggacactggttcgtgcagctgacggtaactttgacctgagctaccacgagtggaaggaccgtcgagctggtgacgatgatacaaaccctcagccatcctttgtgaactcgacgataactgacgtgttcttcttcaggaaccgcttagggttcatctctggagagaacattgtgatgtcccgtaccagtaaatactttgagttctacccgccgtctgtggccaactacacggatgatgacccgctggatgttgctgtgagccataaccgagtgtcggtccttaagtacgctgttagcttcgctgaggagctgctgctgtggtccgatgaggcgcagttcatcctgtcagcaaacggagtgttatccgctaagacagcccagctggacctgaccactcagtttgatgtgtctgacagagcgcgcccttatggtatcggtaggaatatctactatgcagcacctcgcagctccttcacgtccatcatgcggtactacgcggtacaggatgtgagctctgtgaagaacgcagaggacatgacggcccacgtcccgaactacattccgaacggtgtgtacagcatcaacgggtctggtacggagaactttgcgtgtgtgttgaccaagggcgctcccagtaaggtgttcatctacaagttcctctacatggacgagaacattcgacagcagtcgtggtcccactgggacttcgggggtggtgtggaggtgatggcagcaaactgtatcaactcaacgatgtacctgctgatgcgtaacgcctacaacgtgtggatagctgcggtggactttaagaaggagtcgactgacttcccgttcgagccttaccgattccacgtggacgccaagcggtcatatcacatctcagagacagcgtacgacatcgagaccaaccagacggtagttaacgtcaaggacatctacggtgcgtcgttctctaagggtacggtggcaatctgcgagagtgacggtaaaatcaccgagtatgagccgatgggcgactcctggaactcaaccccagacatccgcattagcggtgacatctcgggcaaggatatcgtcattgggttcctgtatgacttccggtatgtgttcagtcggttcctcatcaagcaggagcagaatgacggcacaacgtccacagaggatgccggacgtctacagctgcgtagagcatgggtgaactatcaggacactggtgcgttcactgtgagcgtcgacaacggtagccgcgagttcaactatctggtcaacgccagagtgggttctacgggtctacgtctgggtcagaaggccacaactactggtcaataccgtttcccggtgacaggtaacgccttgtatcagaaggtgtccctgagttccttcaacgcttccccggtgtcaatcattgggtgtggctgggagggtaactacagcagacgcgccaacggcatttaactgaaggaatccttatggtgtgctcaattagggcacactatagggagaccacactaagaggggacttaaagcatgtacataagaaacactgtaagtaatgacttcgagttattcatcccggcctaccatgacgtacttgaggcacaggccatgggtatagaaccatcgttcccagcggttactgagtgtgtcacgttagaccacgatggttttcctttggctataggtggacattgcggagaccagtgctggttcgtcacgagtggccaagtgtggagactcgacagggctggcaagctggagttccgtgagagaatcatggagtacagggacatgttattgaatgtttatccatccctgtggaacttcgtgtgggtcggtaatggtcctcacaagcggttccttaagtccatcggtgctgtattccacgaggagtacactcagggtgggaagttccaactgttcaccataacgaggagataactatgtgctggatggcagctattccaattgcaatgacggcagtacaggccattggtcagtctcacagtgaagccaagatgattggccaacagaacgaccaaatgcgccgacagtctgcccagatgattaaagagtcaaacattcagaacgccaacgcgagtcttgagcagaagcagaagctggaagaggctaccgctgacctgaccgctaagaatctcgataaggttcaggccatgggtacaatccgtgcagcaatcggagagggaaaccttgagggagccagtatggaccgtatcagtagaatcgaggagggcaagttcattcgggaggccaacgcggtcaccgataactaccgtcgagactatgcgtcactgttcgcccaacaactgggtaactccgagtcgaccatcgaccaagttaagaccttgcagaaggctgagggtaagggcaggtccaagttgtctcaggtacttgatggcgcagcggctgtaggttcacaggcggcatccgcatatgcttccggtgcgttcgacagtaagtccaccaaggccccaatcagtcaggccaaaggcactaaggtaggaggtaagtaatggctagtaaattagaacaagcgttgggccaactaccgcaggccgggtctacccgcatccgtggtggctcagcgtccatgcagtatcgccccgtaaccattcaacaggaaggtgtccgtcagtccaacctagtgcagtccttggcgaagtttggggcagcgatgggtgaggcagcggatgcctacgacaagcgccagcgagataaagcggaggagcggtccgacgagattatccgtaagttgaccccagagcagcgccgcgaggcaatcaagaacgggaccctgctgtatcaggacgacccgtacgctatggaggccctacggttcaagactggccgtaacgctgcgttcctcattgacgacgaagtggcacagcgtgttcagaacggtgagttccgtactcgtgctgagatggaagagtaccgccacaaacggttgaccgagggtgccaatgagttcgctgaacagttcatgattaaccctgaggactctgagttccagagagggttcaacgcgaacatcactgagcgcaacatctcgctgtacggtaagcacgatacgttcctgagcgagcaagcccagaagggtgccatactggcctcgaaggttgagctgtcgggcgtactcaaagaccctgccgttctagcccgtccagaatccggtgagttcttccagcgctacatcgacaacgcgcttaagactgggagtatccctagcgatgcccaagcacagcaggtaatcattgggtcacttaacgacgtcattcagcgtccgggtgctaccaacttcctccagagccttgagggccgtccggtcacccttaacgggaagaccacgacctataaggaactgatgggtgaggagcaatggaacgccctgatggtcaaggcccagtcgactcagttcgacaatgacgctaagttgtctgaaggtttccgcctcgggattaccagcgcgttgaaccaagacgacaccagcaagggctgggagatgcttcagggtgccaaagcggaacttgaccgtctacagcccggtgagcagatgaccccagagcgtgagcgtttgattcaggctgaggagcaaatgcaggcccgtttccgtcaggaggcccaagcgaaagccaaggagatggacaagcggcagaagaccatcaacaagaatcaggtaatcgaccagcagtttaccaagcgtatcaacggtcagtatgtgtccaccagctacaaggatatgccgaccaacgagaacaccggagagttcactcacagtgacatggtgaactacgctaacggtaagctggctgagattgaccagatgcagctcacggagcaacagaaggaccgcatgaagctgagctacctccgggcagactcagagggtggagccttccgtaccgttgtgggccagatggtaaccgacgctgggtctgaatggtctgccgctgtgattaacggtaagttaccagaggataccacagcgttgaacaaactgcgcaccatgcgtaacaccgacccggacctcttcgctgcactgtacccggacaaggctgacttgttcctgacgatggacatgatggacaagcagggcattgacccgcagattctcatagacgctgaccgttctcgccgcagtctcaccaaagagatgcagtacgaggatgataaagcgtgggcgtccctgaagaacaactcagagtccccagagctgtctcgcattccagctagtctggacggtatggcccgtaagatttacgacagcgtcaagtaccggacaggtaacagcgacatggcaatgcagcagaccgataagttcctcaaggaatccactgtgactttcaaaggtgacgacgtggacggtgataccattggtattatcccgaagaacatcctacaggtcagtgatgacccacgcagctgggagcagggccgggacatcctcgaagaagcccgtaagggaatcatcgcggctaacccttgggtgaccaacaagcagctgacgatgtaccagcagggtgactctatctacatgatggacaccactggcactgtccgcatccgctacgacaaggagctactgactcgaacctatcaggaacagcagcagcgactggccaaggaagccgaagataaggcacttaaggaagcaaccaaacgtgcacctatctccgcagccactcaggcccgtaaggcagctggtgagcgcgtccgtgcgaaacgtaaagccactccgaagttcatctatggaggtggcgatgagtaaacaataaggagacaacatgagctacgataagtccaaacccagcgactacgatggtatcttccagaaggcagcagactcccacggtgttagctatgacctcctgcgtaagttatcgttcaatgaatcatccttcaaccctaaggccgtctctaagactggccctaagggcatcatgcagttcacccgcaacacggcccgagctatgggccttaacgtgaccgatggtgacgatgatgggcgctacaaccctgagttagccattgacgcaggcgctaagctacttgcgagtctcgttaagaagtacaacggggatgagcttaaagcggccctagcgtacaaccaaggggaaggcccagcaggagcaccccagcttcaggcttatgataagggcgacttcgggtccatctcggaggaaggtcgcaactacatgcgcaagctgcttgacgtagccaagagtcctcagtctggtgctcttgaagcgttcggtggcatcaccccaaagggtaaagggattcccgcagaggatgccttcaagggtatcgctaagactggcaaagttggtactgagctgccggagtcccacgggttcgacattgagggtgtagcgcaggaagcaccaaacactccatacgctaaggacttctgggagaagaccgggactactctcgatgagtataactctcggtccaccttctttggcttcgggaatgctgcgagtgcagaactccagaactcgaccttaggtgtagctttccgtgctgcgcgggctgacgatgggtacgatgtgttcaaggacacgatgaccccgactcgctggaactcttatgttccctccaaggaagacctacagaagctgcgcgactctgggctacctccgagttactacggtgtggtgactggtggtgacggcgagaactgggacgccctcattaagctggccaaggataactttgctgctgaccaaagggccgccgaggctggtactggtgcgaaacttgcagctggtgttgtaggcgctggtgtggacccattgagctatgtccccttggtgggtgtgaccgggaagggtatcaaggtagtcaataaggctctccgtgttggagctcaggctggtgcactcaacgttgcctctgaaggaatccgtacgtctatcgctggtggtgaagctcactatgctgatgcggcgctcggtggtctactgttcggctccggtatgtcagtcctcagtgacgctgtggctgctggtatccgtaagacacgtggtgttgaatcagtgaacgagttcgctggtccggcacttcgtatggaagccagagagactgctatcaacactggtggccatgatacctccacgctacctcctgagaacttctcgtttgagcagaaccatgggggtgttccgtttgccgaccatcctaccgaagagggcgcagtggttctggccaatggttcaatcctgagtgacaccaacccgcttaacccaaggactcagcgggacttcgcggagattgacccagagcgtgcagctcccggtatcaaactcggtgggttcactgagattggcctgaagacattagggtccaaggatgctggtgtacgtgcaatcgctcaggacctcgtacgctctcccacagggatgcaatcagggtctagcggtaagtttggtgcgaccgcttcggacatccatgagcggctccatgcgactgaccagcggatgtataaccagctgtatgacgctgttgaccgtgccatgaaggacccagagttctccgtgggtgagcagaagatgtcgcgtagagctatccgtcaggaagtctacaagcgtgcggccttggcgattgagcgtccagagttacaggctgatttgaccaaaggtgaacgtgaggtgatggacctgctgaaagagcacttcgacaccaagcgtgagctgatggaacagccgggtatcttcggtaacgctaacgccgtgagcatcttccccggtagtcgacacaagggtacctacgttcctaacgtgtacgacaggggtgctaaggaactgatgatgcagaagctgggcggacctgaaggactccaacaggctatcgcccagagctggctcaccagttaccgagtgcgtcctgaggttaaggcacgtgtcgatgagtacctcatggaactcaacggctacaagtcggttgaccaagtgacacctgaggtggtccagaagcacgccatggacaaggcttacggtatcagccacactgaggacttcacggcatcaagtgtcattgacgacaacatcactggtctggtcggtattgagaacaactcgttccttgaagcccgtaatatgttcgacagcgacatcccggttaccttaccggacgggtcaaccttcagtgtcaacgacctgagggacttcgacatggcacggattatcccagcgtacgaccgtcgagttaacggtgatatcgccatcatgggcggtagcggtaagaccacgaagcagctcaaggacgaaatcatggcgttagacaaacgggccgaacgtaagggacagcttaagggtgaagtggaagcactgaaggataccgttaagattctcactggccgtgctcgccgcaacaatgacacagcctttgagacggctatgcgctccttgaatgacctagcgttcttcgctaagaacttctacatgggtccgcagaacctcacagagattgctgggatgttggctaaaggtaacgttaaggcgatgctgcatggtatcccaacgttgcgtgacctcgccaccagaacctctccggtttccggtagtgaactccgtgaactccatggggcgctgttcggtaaggaactagaccagctaatacgaccggggcgtgaggacatcgtgcagcgaatccgtgaggcttccgataccagcggggccatggcgtcagtcattggtaccattaagttcggtactcaggagctgtcggctcgttctccttggaccaagatgctgaacggtacggccaactacattctggacactgcccgtcagggtgtgctcggggatgtggctggtgctgccctcggcggtaagggttccaagttcggtaaggagaacttcctcaaagctgcctctatcagtccagagcagtggaatggcatcaagcaactctttgttgaccatgcgactcgtgatgccaacggacagttcaccatcaaggacaagaaggcgttcagtcaagacccgagagcgatggacctgtggcgtcttgccgataaggttgctgatgagaccatgctgaggcctcacaaggtatcccagcaggattccaaggcgtatggtgctggtgtcaagatggctatgcagttcaagaacttcaccatcaagtcactcaacgctaagttcattcggtccttctacgagggctacaagaacaaccgtgccatcgacatggccctgacccacgtgttgtctatgggtatcgctgggacttactttgcgatgcaggcccatgtgaaggcttacggactccaagaggctcaacgtaaggactacctgaagaaagctcttaacccgactatgctgggctacgcagcgttgactcgaagttcccacactggtgccccgctgtctatcctttcgatgatggctggtgccgctgggtatcaggatgccaacatgctgcgctctacaatcttaccgaaggaggaacagttccagaagaaagacaaggcagcacagggtcgtaccgaggcgtctgactttgcgggtaacttaggttctcaggttccagcactgggttacatcgggaacgttgtggctaccgctaagaatgcttatggtgttgctacagcgcccaataagccgactgagcgtgactacatgactggcctgatgaactccactaaggagcttgtacccaacgacccactcacccagcagctcgtgatgaaaatctacgaagccaacggtgtgaccatcaagcagcagccaaagcctaactaattaggacacactatagggagaccgattggtttcccttctcattcaacttaaggaggtcataatggaccaagacattaaaacagtcattcagtacccagtgggagagactgagtacgacatcccgttcgactacctatcccgtcgcttcgtcagagtgtctctggtctctgaggattcccgaagactgctgagtaacatcacggagtaccgctacgtctccaagaccagaatcaaactactggtttctactgaaggtttcgaccgtgttgagattcgtcggtttacctcagcctctgagcgaattgttgacttcaatgatggctctgtgctgcgagcaacagaccttaacgtatcacagctacagtcggcgcatattgcggaagaagcccgtgatgcagccctgctggccatgcctcaggacgacgcaggtaacctcgatgcacgcagtcgccgtatcgttaacttagctcccggtattgacggcactgacgctatcaataaggaccagttagattcaacgctgggtgaggctggtggtatcctttctgatatgaaagaagtacagaaggaaacctatgactatatcgagaagctcggtgatgacacttcaattgtccgtggggtaacttgggtgtacaaccaagggtctgccgttggtggtgagactactgtactcatcgataaacctacccgcacgctggccgttccttatattgagattaatggtagccgccaagaggttgggtatcacttctcgtttgatattgccacccagatgattaccttaacggaaccactggttaccggggacttcctgatggcaatgaccacagagtctagtgtacctctggaagaccttctggctaacccgactggtgcctcggctatcggtacctccgatggtcgaaacgttcaggcaaacatcgacgagcttcgctcagagttagacttcctgaaagacactacggtgctcgacgttcgccgttttggtgctgtaggtgatggtattgcagatgattacccggcgtttcagaaagcgtgtatcgctgcgagccaacttggcggggcaatagtccacgtaccgaccccaaaggtaaaatggaagattggattcccggtatacttgttcgaccgaacttgggtccggggtacaggcatcaactgtattgtagagttcactgacccgctgtatgcgcgcaagtcccgctctgggttcgtcattgggtctggttacgaacagaaccgcgacaaggccattcagtgtcttaacgatggcacttgggccactactggctcggtggtaaatagggacttcgttgaattggaccgagggcagtacgtacgcgacaaccctagcaaggtccagtcaagactgtgccgagtgtccgggatgtacctgaaagcttcgtatccgaacggtgctaccctgaagggcggctacgctgtgtctggtgccaacgcggtagactcagaggtatttgacatttggggtgaaggttggactgagattattgacatttggggtgaaggttggactgagattatcaacttcgggtctgacgtaccgccagctacgccaagttgtcacaacctccatgcgtacgacatcacgtgtgttgctcctaacgactacgagacgtactacagcgcagggttcattgcgaactctacaagctgctctattggccgattcaagcagctcagggcaatagctgatggttctcctcacggttcctgtggttccgtgaactacaccgagtattgctccttctacgatatcgacgtaccgagcttaggtcgtacagcctcgtctgagggtatccttgtgaacaactccaagggcgctgtgactcgtaacgttcgtattggtaacgctaagaccggggtggccgagtattacaccactggtgctggtatcttctacgacagagaccaacccaacgtgttcgatagtatccatgcgaataactgtgacaacgcggtagctctccgctccaagttctcggtttggaagaacgtgacgcagaccaactgtacctatcacgtctacttcgggacgaccaacgcacaagcctgtgtggtcaagttcgtaccggacacaatcggtggtggtaataacgtagacattctggacaggctccgcgataacgttgtgactggctggcgtgtgcgctcgctccacatccgccccatcgcctacctactgaacgacaagtcagtgttgcgtagctgggatgctggtaagaacatcaaggctgagaacggtgtgggattccagtggttattccctgtaccatctaccatgcgtgcaatcactcaggtcagccaatggtttactttcgaggtgggtgcagcgacggcagggacagaggtcaaggttcaggttcgccgtatgtcagcgtacaacggagacgccaacgagcagcctgtaatcctctttgagaacagccgaaaggcctctctggataccgtacaggctactaacattgtggccaactccccgggtctggtcctgacgtcccctacggatggactggctaacgctgtggatgtcctcgtgagtgttacggcaccgaccgttaacttcaacatgaaagaagctcgcatcacgtatctgggcgactaactaaggagacagtatgttaaacaaattgaatcaacctaaaggctctacaatcggtgtgctcaaggatgggcgcaccgtccaagaggcaatcgacgagctggagaagattaagacccgcaacgttgaccctgagcgcttccgtgagacactgacgtcaagtgacgatgaggtattcgagaagctgttcgcgtggttggctactcagtcagacgttgtgggaacctcaagttcttcctatatcacagccttacctcgcatgattgagcttagcggtcgtacctatacgttgactaagcgtcacgtgctggacggtaactttggtatacagaacggtaccatcctgatgtccggtgagggtgagattatcatgggcctcgatgctggtaccaagactcgtcgtcacttccttaagtatgtacatttcgaatacatcgggtcggctgaccgggatacctcactggttactatggcccgctgttttaactcagtggtgctgttctgtaacttcatcgctggtggggatactgcccgcaaccgggcaccgcgtacccgttacggcctgttcgcagggtccaccagatgctggggcttccagttaatcggtggtgagtattacggtggcgactgtgcgttgcgtgttggacgcgctaacgaccacactgggttgaccattcgtcccggtaccgttcaccactcacgtgttatcaacatgctgctgtgtaaccctgctggtgcagaggtgtctggttgtaacattgagcacgcagataacggtgcgattggcttagggattacatcaggtaccaacacctccggtaacgcagcccacggtgttcgcatcaacggtgtgtacttctataacaatggtaatggttccagtgggtcaaacgttgctccagcgaacatcctcatagggaaggacattccggggactgagggctgggacagaccgggcgagttgattacgtcaagtcaaaacacagcgcacagcattacggtatcagagtgctacatcgttagtccgaacacccagaacgcttggcaggttaacgccctgtacagtgtgtccttcttggataacaaagtgggactcaaaggtgacgctacgattcacggtgtgtacgacggtacgtgtgctaactgctgggctgtaggcaaccgagaccaaggcggcaaggtgttccagttctcctctacggcaaccaacacgattctgactaccagaaagggtaagtggactccgaagattatcggtgagggcacagcaggtaacacgacgctgagtgcttctggtggtgcgtactctctggataacggaatggtcaccgtgtcgtgcttcgcagtggttgacactaaggacccaaacatggctggcaacctgaacatcaaactaccggtagcctgtgaggaccagcagcggggcggtacaggcatatcgttgacgaacgtcccagacgtgccgagcccgaatggtagcatcattgtgataggagacaccgctcgaatcatgctggggtctgcgcgattacagccagcgaacgtcacgactggtaccgccatccacttctcggtgtcctacccagcagacgttaaggtataaggaggtaacatgctgtccctagacttcaacaacgaagttatcaaggcggctcccattgcgggggtcgctggggctgacggtgtagcgaggctcttttggggcctctcactcaacgagtggttctacgtcgcggcaatcgcctacacagtggttcagattggtgccaaggtagtcgataaaatcattgactggaagaaagctaataaggagtaacatatggacctgattaagttcctcgaaatgttagacactgagatggctcagcagatgctcatggacctgaagaatcctgagaagcgaacccctcagctgtacaacgccattggtaaactgctggagcgccacaagttccaaatctctaagctgacccctgacgtcaacatcttgggcggactggctgagggtctggaggcttacaactccaaggtgggcgctgatggtctgacagacgacgataagttcaccctacagtgatatactcaaggtactactatatgtagtgcctttatggatgtcattgcactacgctaggcgttcctacgtgaaatctgagaaacaacgggaggcattatgctggagttcacaaagagaatcgtcccgtatcttgtggctatcatggtgtttgccttcgggtggcacttggggtcacaatctacggacgctaaatggaaggaggtagtacagaatgaatacgttaagaagcaaacggctagagctgaaactcagaaagcgattgacgcagtatcggctaagtaccaagcagaccttgaggggctggagggcagcactgataggattattgctgatttgcgtagcgacaataagcggctgcgcgttaaagtcaaacctaccagtgtccccgcaggaccagacggtcgatgcctcgttgatggttccgtcgaactacacgaagcaactgctcgaagtcttatcgcaataacccagaaggccgaccttaaagagaaggccctacaggatacaattcgtaagctgcaaggtaaaggaggtgaacattgagcaactctcagcaagccaagaacgccttaatcattgcgcaactgaagggtgactttgtcgcctttctcttcgtgctctggaaggccctgaacctgccggaaccaaccaagtgtcaaatagacatggccaagtgtctggcgaacccaaagaacaagaagtttatccttcaggctttccgtggtatcgggaagtcgttcatcacgtgtgcgttcgtagtgtggaccctgtggcgtgaccctcagttaaagatactgattgtctcagcctcaaaggaacgtgcggacgctaactccatcttcatcaagaacatcatcgacttgttgcctttcctgagtgagcttaagcctcgccccggtcagcgtgactccgtgattagctttgatgtaggccctgccaagccggaccacagcccgtcagttaagtctgtgggcattacgggtcagcttactggtagccgtgccgatatcatcattgcggatgacgtggagattccaggtaactctgcaacacaaggtgcccgtgagaaactctggacgttggttcaggagttcgccgcactgttgaaacctctaccgactagccgtgttatctatctgggcacacctcagaccgagatgactctctacaaggaacttgaggacaaccgtgggtactccaccattatctggcctgcacagtatcctcgctccaaagaggaagacctgtactatggtgaccgactggctcctatgctccgcagtgagtacgatgaggacaaagagggtctcagcagtcaaccaactgacccggtgcgattcgactccatggaccttcaggaacgtgaggtggaatacggcaaggctggctatacgcttcagttcatgctcaacccgaacctcagtgacgccgagaagtacccgctacgcctccgtgacgctatcgtgtgcggtctacagatggacaaggccccaatgcactaccagtggctgccgaaccgtcagaaccgcaatgaggagcttcctaacgtgggtatgaagggtgacgagatttactccttccatacagcctccagtaacactggtgcgtatcagggtaagattctggtcattgaccccagtggtcgcggtaaggatgagactggctggtgcgtgctgtacaccctcaacggttacatctacctgatggacgctggtggtactcgtggttacgaagagaagtcccttgagttcctcgctaagaaagccaaacagtggcaggtgcagactgtggtctttgagagcaacttcggtgacggtatgttcggtaacgtgttccagcctgtgctcctgaagcatcacccagcgcaactcgaagagattcgtgctcgtggcatgaaagaggtccgtatctgcgatacccttgagcctgtactggcaagtcaccgcttggtcatccgcgatgaggttatccgacaggactaccagacggcacgtgatgcagacggtaagcacgctctgaagtacagcctgttctaccagatgacccgtatgagccgtgagaagggcgctgtggcacacgatgaccgacttgatgcgttagcattgggtgtcgagttcctacgctctacgatgcagcaggacgctgtgaagatagaggctgaggtacttcaggagttcttggagcaccacatggagaagcccctaagtaacatctcccagttccgggccaccagtagcaacggtgtggacatccgatgggaagacgagggggatgacactatgttcatcgcatggtgattatgcagggattgtgcataaggattcattaggccacggaaggccacttaatgaaaacttcaggtataacagacacttggaattagggcccactatagggagagacccttgaagacttactataagactacttaaagtttcattcatatagttatgcacttaaagtctccttacagatagagggtagtgatgataatatcaccctctcaccataagacactaagagccaacataaggaggacctatgcgcttattgttaaccttactgcgccataggactacttggcgatttctgcttgtacttgctggtgcccttggggctacactggttactcagcagcaactcagtggactggagactctcgtgtgctctctactcacttgtagcgattagggtcttcctgacgcgctagggattccgtagtgatgcttatcagcatacaccactccatccctctacagtcaatacttaaagttaaccttatgtaccgcccttgggtctacctacggtaagcaccgtacctgaggaagtacctgaggttacctttaagaattttacacaaagttctgagtggatatctcacagtttaaactttcagtactccccccggtggccctccagtcaccttcagttcaccttgggtacccctcctttaaccttaggattaccttgggtggtaccttgggttgacctgagggatactatatgttgtggtgtgggacaccttaggacactatatgttgatgtctctgtgtccc

SEQ ID NO: 6 - DNA, 40698 bp, Unknown
  source: /note="Description of Unknown: KP3W-P0106 Bacteriophage sequence"
tatctgttgatactctccaagtagcctccaagtcatacctgaggagccaacctgaggttagacctgagaccatataccttaggttaaccatgtgaccatccagcgagtcatcactataaggttattcagtggtcagtgtcaatatactaaacaattaggtatcactatagggagacactttaagtattactaagagaccatcaccatacactttaagtattactaagagaccatcaccataaagataactatcactataggtctacataaagtttaacttaaggtattgacattcagaatccgttatgagacattagcaaccgttgagagacacaacgtcaccagcaaccagacaataccacgagttatctggttagactgagggtctcaagtagtcatcaaccggacatacgaaagtggttgactcaacgatgaacaagtagtacgatgtatcacagattcacagacatgaagtaccgctacctagtagcatcgctctttaacaatctggtttgtgtcttgataggcttactcacaaaggtgaactattatgactaacgcacaacgtaaacgctatgaagtattacaagagaaacttgctgttgcttatgccgcttggcaagctaacacagacaagagcaaacacgataaactttacagtaaagtggttgcaattaatgctaaaatagataaacttgtgaatagtaccttataagatagttgctggcactagccggcctatcaaggcacaaaccaagctctttaacaatatggattaatcgctgacatgtacatcactcatcacttagtgtttaactagtggtcacattcaggtctctggcaaggtacgtcctgtcatcctgagagtagccacactgataaccactaccgaaacaacatcgaggatatacaccatggaacgtaacgctaacgcatactacgaacttctggctgcaactgttgagctgttcaatgaacgaatccaatatgatgaactcaccgaagatggtgattggtctgatgcattgcacgaggtggtagacgggcaggttccgcattattacagtgagattttcacggtgatggctgctgacggtattgaccaccagttcgacgactcaggcctcatcccggacaccaaggacgtaagccgcatctgtcaggctcgcatctatgaggcactgtacaacgacgtatcgaacgactctggtattatctggtgggaagaaccagaggacgaggacgaggaggactgtgatgcttaagtatggactcacacaacgcatcatcaaaacgcaccgcgatgcactccttaaggtagcactgactggcaacattgaggcgacacgagagcgcttcgcgtaccatatgtcgcacttggcccaaacctatcgcacacgcaaggtaatgtatggtaaccatgttcgtaattagtgtgtacgccctgattgtcctgtactttgtgcgggactttcgcaagggtctcaaggtgcacaaagcatcattcagttacatgaagtggggcgtgttgcctcgctttactgtacggctacctaatggccgctttaaggctaacaaagtgggaatattctatgtcgcaactcactaacatgaagcacatacgggccgctttacatgtaatggcctatggtgccagtgatgcactaaccaagcgcatcttgacgaaacaccgcaggatgaccgctcggcaagcggctggtgctgtcaagtgggctagactcacactcctctcataccaataaatcatcacacacaacataaggaaacaacctaatgaactacaccgacatgcaagaacgcttagaagccatccgtaacctgccaatctgtgaactcgacgagcgccagccgctgctgatagcactcatcgcggacattgtgaactgtgagacgtccgacggtgacgatacggccagcgattggggtctggaacgtcaggactattggcaaacactgaagattaaggccaaagacgccgggtttaacctgctgggtaatggtcacttcagcgcagcgtttaagcacgagctactaccgggtagggtcatcaaggttggctttaagaaagaagactctggggccgcttacgtagcattctgccggatgcatcaaggtcgtgacggtattcctaacgtctatcacgtagcgcgtcacgctgggtgctacacggtggtactagatgagttgttaccgtgtcaacgctacgaggatgatgaccacgaccattatgcagacttagcgtttcaattcgttgagtgcacaggctacgaccatgaggattaccgcaaggatgaccagccgttcatcgaaacgtgccagatgattcgcaagttcttctacgggattgcgtccttcgacatgcatagtggtaacatcatgttcaccaaagacggcaagccagtgattaccgacccggtgtcattctcgcatgaccgcgaacgtgagtcgttctcactggaacctgaggaactgctcgcagagattgagcagatagcgcacgccaagatgattgaacgctgtaagcgcaacaaggctaagcgtgacccgaacggggagctgcgcatcgcacgccgtaaggtcaataaggagcgtcgagcatgccgtaaggcacacgctaggtggcgcaaggagcgcgagcggattaacgccgaggccctaaagttcaaccttgcgaaaatcgaggaacgagtacatgcatggatgactcatgagggtctagccattcagcagggtagaggccttccggttgacaactaccttcagggtagacttatgggttaactaggtgtatcttaggtgtctctcacgcaagaggcaccgatagataaactttattaacgccagttcgctggcaccaaagaggcacacaatgaacgcattaaacattgcacgtaatgacttctcagagattgaacttgccgctattccgtacaacatcctcagcgagcactacggggacaagctggcacgtgaacagctgacacttgagcatgaagcgtacgagctgggcgaacagcgtttcctgaagatgttagaacgtcaggtgaaagctggtgagttcgctgacaacgtggccgctaagccgctggtcttaacgttgcacccacagttaaccaagcgtattgacgactggaaggaggagcaagcaaacgctcgcggtaagaagcctcgcgcatactacccgattaagcacggtgtggcctcagagttggccattagtatgggcgctgaggtgctcaacgagaagcgcggagtgtctagtgaggcaatcgcactgttaaccattaaggtagtcttagggacgctcacagacgcctcaaaggctaccatccagcaggtatcctctcagttaggcaaggcccttgaggatgaggcccgcttcggtcgtatccgtgagcaggaagccacctacttcaagaagaacgtagcggaccagctggacaagcgcgtaggccacgtgtacaagaaggctttcatgcaggttgtcgaggccgatatgatttccaaagggatgctgggcggtgacaactggtccagctggaagaccgacgagcagatgcacgtggggaccaaactgctggagttgctcattgagggcactggtctggtggagatgaccaagaacaagatggccgatggctccgacgatgtgaccagtatgcagatggtccagctggctccagccttcgtggaactcctgagcaaacgagcgggagcactcgcgggtatcagccctatgcaccaaccgtgcgtagtccctcctaaaccttgggttgaaaccgtaggcggtggctactggtctgtaggtcgtcgcccgctggcgctggttcgtacccactccaagaaggcactgcgccgctacgcagacgtgcacatgcctgaggtatacaaggcggtaaacctcgcgcaaaacacgccgtggaaggtgaacaagaaggtgctggcggtagtcaacgagattgtaaactggaagcattgcccggtgggtgacgtcccggcgattgagcgcgaagagttaccaccacgcccggatgatatcgacaccaacgaggtggcacgcaaggcatggcgcaaggaggccgcagcggtctaccgtaaggacaaggcccgccagtctcgccgtttatccatggagttcatggttgcacaggccaacaagttcgctaaccacaaggccatctggttcccgtacaatatggactggcgtggtcgtgtgtatgctgtgagcatgttcaacccacagggtaacgacatgaccaaaggtatgctgacgctggccaaaggtaaaccaatcggtctcgacgggttctactggttgaagattcacggtgcaaactgtgctggtgttgacaaggttcctttccctgagcgcatcaagttcatcgaagagaacgagggcaacattctggcgagcgctgctgacccactgaataacacatggtggacacaacaagattcaccgttctgcttcttagcgttctgcttcgagtacgcaggagttaaacatcacggcctgaattacaactgctcgctgccgctggcgttcgatgggtcctgctctgggattcaacatttcagtgcgatgctccgcgattccatcggtggtcgtgcggttaacctgctgccttctgataccgtgcaggatatttacaagattgtggccgacaaggttaacgaggtgctacaccagcacgttgtcaacgggtctcagacggtggtcgagcagattgctgataaggagactggcgagttccgcgagaaggtgactctgggtgagtccgtgttggctgctcagtggttgcaatatggtgtgacccgtaaggtaactaagcgttctgtcatgacgttggcgtacggttccaaagagtttggcttccgccagcaagttcttgaggacaccattcagccagctattgataacggcgagggcttgatgtttacgcaccctaaccaagcggctggctatatggctaagctgatttgggacgctgttaccgtgaccgtagtggccgctgtcgaggctatgaactggttgaagtctgccgctaagctgctggccgctgaggtcaaggacaagaagaccaaagatgtgctccgcaagcgctgcgcaatccactgggtaacaccagacggcttcccggtgtggcaggaataccacaagcgtgaccaagcgcggttgaagctgacgtttctgggtcaggccaacgtgttcatgacgtacaacaaaggggacaccaaggagattgacgcccacaagcaggaatccggtatcgctcctaactttgtgcactcacaggatggtagccaccttcgtatgacggtagtgcacgcttatgaggtctacgggattgactcctttgcactcattcacgactccttcggtaccattccggcagacgctggcaacctgttcaaggcggttcgtgagaccatggtgaagacttacgaggataacgatgtgattgcagacttctatgaccagttcgctgaccagctgcacgagtctcagctcgacaagatgcctgaggtaccagctaaaggggacctgaatctgcgcgatatcttagcgtctgacttcgcgttcgcctaaggtctccggtaattaggtagcactatagggacccgctctgggtccatatacttaaagacaacttaaagtaaacttaaagaggcacgctatgacttactcaatcgttgtaaccatcttgttaatcgttgtaaccatcttgttcatccggtctgttctgaacgcaaccgacctacagagcactcttagctcaaaggtggaaacacataaacaggccatagagtcagctgtcaccaaggtacgtcgggcagaagaggacagagcgtcatgctaccgaaggttacggcacattgaggacctactgtatgctgagaaagacagggtgacgactctaagtgggcgcatcacaacccagcgtgaccgaatgaagcatctccgtaagaacaacgatgagttactgaacgagctgatgctggtctccgacctgattcacgttaagttcaccgctgtgttgcctgacggtacccactctaagacgctctttaagttaggacttgggccgtgcggtttgcacgttaagtccctccgctggaccgagctggaagaccgctatctgatagaccagctgtgcaccaacggcgagcgtaagcagttcgtctactataagaacgaagtagtaggccgcatcgagttccgccacggcaaggcatgattaggtagcactataggaacatactcaaggtcatcatctggtggccttcatgaatgtccctaacaaccactcaggagcagcactatgtatcagaacacaatcaacttcgagcgcagccgtgaacgtcagcagaccgagggttatatccctaagggccgcaagctgaacaagacgcagcgcggcggtggcgtgaagggttccttccgcaatgcgaagggtgacagcgttgtcaaccaagagaaatatttcgtgggagcataacaaatggctaggttcatattcgatgggagcacatcacaatggtcgcgcttgggagcatccgagcgtagacttgtggaagcaacgtcactcaaggtagacatgcaacacagtccaatgttcgacgccgtcgtagtctatgtgtacgaaagtgatggaaggctcctcatggctaagcccttcagtcgatggtcaattgattccgcgtcagactggctggcaaaactcactaccgactacgcaagttggaagtgattaggtagcactataggcagactcaaggtcatcggattccggtggcctttatgattgcttattgcacactaaatgaacactacacttcggagacatcatcatgatgaacattaagaccaacccctttaaggctgtatcatacgtccgctctgctatcgagaaggcactggaaacttccgggtacctcatcgcagacactaagcacgatggtgtgcgcgggaacatctgcgtagataatacggccaacgcagcgtggctcagccgggtctccaagaccattccggcccttgagcatctcaacggtttcgaccagcgccggcagaagttactgaaagatgaccgctggattttcccggacggctttatgcttgatggtgaactaatggtcaaaggcgtggactttaacaccgggtctggcctactgcgcaccaagtggctgaaagctaagaactatgagttctcaacatacgccattgagaaagagtgggataaccctaagggtaaagtaccattccacctcaatagtgccgacctcaaagttgttctgtacgatatcattccgcttgacattatcgagtccggcgatgactacaacgtgatgaccctcctccgccttgagcacgtcaaggtcgccttaccagttcttcaagaccacttccctgaagtcgagtggtgcctctcagagtcccatgaagtttacgacatggacgaactcgatgcgctgtaccgacagaaacgtgaagaaggtcatgaaggtctagtggttaaggaccctcgcggtatctataagcgcggtaagaagtccggctggtggaaactgaagccagagaatgaggctgacggcgtcgttgtgggactcaactgggggactcccggtcttgccaacgagggcaaggtgattggcttcgaggttctccttgagtccggtcgtgtggtatccgcaaacaacatctctcaggcacttatggaggagttcacaaagactgttctcctaagtgcatccagcgcagagtggcacaatgcgaacgaggacgcacagcttctaccgaacccttacgagggctgggcgtgtcaaatcaagtacatggaggaaactccagacggctccctgcgtcacccgtcgttcgacaaatggcgtggaaccgaggaagaccctaccgtcaagatgtaattaggtagcactataggagacaacaatatgcccatcaatctgattctaatcatcgtgttcatcctcgcggctatcgtgtggtcaatgaacgacgagccaccatacagcggaggctaaaccatgcgtttacatttcaataaatcaaacggtatcttctcggttcgccgggaggaccgcagcactgtagcggcctcggagcgccacggtaagcttccattcataggtgataccttcgagctggcacccagcgtgcacatcttggttactcgcggtctctacgaattggctcagactaagagccgtcctttcgtacccgttgtggtaaccaagtggccacgccttcgcctgttctgggagcgactcaaggaggtggtcaatgagtgagcacaaggaccactgcgcatcactgcacagcttccgagcgtgtgattgtggtgctgtaccagtacgtaacaccattcctattggtaccgttgatgatggtgttaaacagccaagtcattaccagctgttcgaaggcgtagaggccatcgaggttattgctcgcagcatgaccaaggagatgttcaaggggtactgcctcgggaacatcctcaagtatcgccttcgggccgggaagaagtccgagctggcaaccttagagaaagacatggctaaggccactttctatctggagctgtacaccaagcacaagggtctatgctatgacaccaagcacaagggtctatgctatgacgcgaagacgctcgacccgcgtacatcaccctgtataacatgtggaaggagcgagaagatgcaaaagttcgtcgtaacggtcaagacagctaacgcatcgtacgaactcccggtacacgctgggtctcttgaggaggccctcgaagttgccgaggcggagtacgaagagttaggccaagtgactcgggtacgcccggatactaatttcgggttcgacctgtgtcattaggtagcactatagggacacaggttgtccctcttactgtttaaacttaaaggagattcatcatggcattcgctaagaagaagatttataccaccaagattggtacctgtgagccgtatgcttacttcaacaagccggactatggcggtgagggttttgagaacccacgcggtacctacaaaggttccgtaacgttcaagaacgaagactgtcaggagctggtagacctcattgttaagacccatgaggaaaactacgcggcacgtctggaagcacacgaagcgaacccgccgaagtttcagaagggtaagaagccccttaagccgtacgaaggcgacatgccgttcttcgacaacggggatggtaccaccacgttcaacttcaagtgctacggttcgtacgaggacaagaagactggcgagaccaagaagattgttctgggtgtagttgatgccaagggtaaacgcatccaagacgttccgattatcggcggtggttccaaagtgaagattcgcttctctctggtaccgtatggatggtcggcggtagctggcgcttccgttaagttgcagctggaaggcgttatgctggtcgaactggctacctttggtggtggcgaagatgactgggctgacgaagctgtagaaggaggctacgaggcaagcgaagactctcgtcgtggtaaacctcaggaagacccggaagactggtctggtgaggaagctgacgagggtgaagccgaagaagaagatgacttctaatggcgggctatggggccaaagggattcggaaggtgggtgccttccggtctggccttgaggacaaggtgtccaagcagttagaagcaaagggcgtcacgttcgattacgaattgtggcgcatcccttacgttattcctgcgagtgaccacctttacactccagacttcttgttacccaatggtatcttcgtggagactaagggtctctgggaagccgaggaccgcaagaagcatctactgattcgtgagcaacatccagagctagacattcgtctggtattctcgtcgtcacggaccaagatttacaaagggtcgcccaccagttacgctgagtggtgcgagaagcataacatcttgtttgccgacaaattgattcccgtagactggctgaaggagccgaagcgtgatgtaccgttcggcaagttcaaacagaagaaaggagcaaagtaagtatggctaaggttcaattcactaagcgacaggagacctctcagattttcgtgcactgttccgccactaaggcaaccatggacattggtgtccgtgagattcgccagtggcacaaagagcagggctggctggatgtagggtatcacttcatcatccgtcgtgatggtaccgttgaggcgggccgtgaccaagacgctgtgggttcacacgtcaaggggtacaactcgacttctgtcggtgtgtgtctggttgggggcatcgacgctaagggtaaccctgaagcaaacttcacgccagcccagatgcagtctctgcgctcactgctggtagaactgaaggtgcaatacgctggggcagtgttgatggctcaccacgatgtggcaccgaaggcttgtcctagcttcgacctgaagcgctggtgggagaagaacgaattggtcacttctgaccgtgggtaaacattaggtagcactacagggagacaatcgcgtttccctgttgtcgcttgaggagattactttatgaacaagttcaaagagcacttcgatccaatcccattcctagcatatggactgttagggctgtgggcgctatccttcgtggtctcgtttgtagcatcttgcattaatggtacatcgatatgagttacggagactctcaagaagatggtcaggagagtatcttcctgttccacgctccgtgcgaaaactgtggttcttctgatggtaactcagtgtactctgacgggcacgagtattgcttcgtgtgtcaacaccgggttcccggctcagaggaacgtaccgaaaagttatcatcaagaagacccaaaggagggaattacgggatgaatacacaaggttcaggactactggtattcggagagagtgacggtcggtacactgacctgacagctcgtggtatctcaaaggcgacatgccagaaggctggctattgggtcgccaaggtccgagggactgcctatcaggtggccgactatcgagaccagaatggctccatcgtctctcagaagctgcgggacaaggagaagaacttctctaccagagggtcccacaaaggggatgcactgttcggtaagcacttatggaacggtggcaagaagattgtcatcaccgagggtgaaatcgacatgttaaccgtgatgcagcttcaggactgtaagtggcctgttgtttctctcggtcacggtgcgtcagccgctaagaaaacttgcagtgcaaactacgagtatttcgatagcttcgaccagattatcctgatgttcgatatggatgaccccggtcgtgcagctgtagaggaagccgctcaggttctccctcccggtaaggtccacgtagcggtgctgaccgagaaggatgccaacgagtgcttactcaaaggcaaaggcaaggaggttctcgaccagatatggaacgctgcaccttgggtgcctgatggtgtcatcggcgctatgtccatgaaggaccgagtacgcgaagcaatgaccagcgaacaaagcgtaggataccttttctcgggatgtccgggactgaatgaccgaaccttaggtgcacgtggtggcgaagtcatcatggtcacttctgggtcaggaatgggtaaatctacattcgttcgccagcaggcactagggttcgccagagagcagggactgaaggttggcatggcgatgcttgaagagtccgtagaggagacgatggaggatgttctagggattgctaacggcatccgcttacggcagcaacctcgggagttcaagcagaagctgatagaagacgggacgtatgacaaatggttcgatgagctatacggcaccgaccagttccatctctacgactcctttgcggaagctgaggtggaccgcttgctggccaagttgcactacatgcgcacagggttaaactgtgacgtaatcattctggaccacatctcaatcgttgtgtcagcctcggaggaatccgatgagcgcaagatgattgaccgactcatgaccaagctgaaagggttcgctaagtcaaccggagtggtacttattgttatctgccacctgaagaacccggagaaaggtaaagctcatgaagaaggacgtgctgtttccattactgacctgcgtgggtctgggtctctgcgtcaactctctgatactatcattgcccttgagcgtaatcagcaaggggacatgcctaatcttgtcctccttcgcatcctcaagtgtcgctttaatggtattggcgttggtattgcgggatacatggagtacaacgaaaggaccggactccttgaaccgtctagctacactggcggagaaggagagggtgatactggctgggaaggccacgaagaagacgactattgaaccagactggaagttaacaacacaatgtaattgcccatgggatagaccgtgcgtctgtcctgaccgggcttaatcaacctgaggagaaccatcatgtttaaacttatcgaagcattaggccgtctggtcatcgcgttgtacgtacgtgaagccaaggcactggacaaagcgtccaaggtggaagcagaagcagccgctaagctggctaaggccgccgacaaggcacgtcaggcatctcttgatgcaaccgcagaggcagcgaaagttgcacttaaagctcagaaacttaaggagttcttctaatgactaccaaagctaaattccccggcaacaccattcagctgtccgacactgtagaccagtggggccgcaaggttcacatcaacgtacgcaacgacaaggtaactctggtctaccgctggaaggcaaagagcgataaccgtgctcacactcagcgtgtgaccctagacgatactcaagcagctcgactgctggcatccgtagccgtagccgctactgtggccatcggtgaggacaaagtgcgtgaggccatcctgagtaaagaggtaggctcaacggcaacccgactggccgaagcgtcagaagctaagtgataaactcaaggtcattactatatgtagtggcctttatgattatcacacacaacatattgagaggacataaccatgcgtaaacctgaagaaatccgtgcagacattgagaagctgaacaaagagctggaagctgttaaggtccatgagtccagacaggttgctgctgttaacatcttgtataacttagggtggacacacgaccctcacaaaggctggcagaaacccgcaccaaagtggagtgactacaaggccccgcttaaggctggcgagctggcaacttgggatgacagggttcttggtggaatagtgtacatccgaagtgttggagacaagtttgcccaagtgtcgcacgtccgtggtgttagcaggcttggagttgacgtgcttaatggtagctttgccgtagagaaaagtaagttaaccgtgcgtccgcgtgagtatttcatcgggcgtcgttaagcaacaggagaccactatgttagtatccgatatcgaggctaacaacctcttagagaaagtcactcagtttcactgcggtgtcatttatgactacagcactgacgagtacgtatcgtatcgaccttgggacttctccgcgtatctcgatgcgctggaagctgaggtggctcgtggtggtctcattgtattccacaacggtcacaagtatgatgctccagtgttgaccaagctggccaagctccagttaaaccgtgagttccacctgccgcgcgagaacgtagtggacacgttggtcctgagccgtttgctgtttgcgaacattaaggattccgacatggccctactacgttccggtaagttacccggtaagcgcttcgggtctcacgctctggaggcatggggttaccgcttaggcgagatgaagggtgagtacaaggacgacttcaagaagctccttgaggaacagggagaggactatgtggacggttctgagtggattagcttcaacgagccgatgatggattataacgttcaggacgttgtggttaccaaggcactcttagagaagttgctgagtgacaagcactacttcccggatgacgttaactttaccgattgctgtactgatgccttttggtatgattcctgcgaggccgtctggctggagcacagagctgcgtggttgctcgctaagcaggagcgtaacggcttcccgttcaacaccaaggccatcgaggaactctacgttgaacttgctggtcgtcgttctgaactccttcagacactcaccgacactttcggaacttggtaccaacctaagggcggcactgagttattcctgcaccctcgcaccgggaagcctcttggtaaatacccacgagtgaagtacccgaaacagggtggtatctacaagaaacccaagaacaaagctcagcgtgagggtcgtgaaccctgtgagctggacactcgggattacgtagagggtgctccgtacacaccagtagagcacgttgtgtttaacccaagtagccgagaccacattgcactcaagctgaaggaagccggatggatacctacagagttcaccgataaaggtgcgcctaaggttgacgatgaggtccttgagcatgtgcgtgtggacgaccctgagaagcagcgctgtatcgacctcatcaaagagtacctgatgatacagaagcgtatcggtcaggcagctgagggtgacaaagcgtggctacgttacgttcaagaggatggtaaaatacatggttcagtcgatcctaatggtgccgttacgggccgagcgactcacagcttcccgaacctcgggcaagtaccgggtgttcgaagtccttacggcgagccttgcagggctgcttttggtgctgagcatcaccttgatggcctcactggtttaccttgggtacaagctggcatcgacgccagtggtctggagctgcggtgtctcgcccacttcatgtccaagtacgacgggggagcttatgcagatgttattcttaacggggacatccacacagtaaaccagcaggctgctgagctgcctacacgcgataacgccaagacattcatctacggcttcctctatggtgctggtgatgaaaagattggacaaatcgttggagcaggtaaggaacgcggaaaggaactcaagaagaaattccttgagaacaccccagcaatcgcagccctgcgcgaaggaatccagcagaccctagtcgagtcatccagatgggttgccggagagcagaaagtcaagtggaaacgtcgttggattaagggactcgatggacgtaaggtacacgtacggtcaccacatgctgcactcaacaccctccttcagtcagcgggcgcgctcatttgtaagctctggattgtcgagactgaagagttacttctcaaagctggattaaagcacggttgggatggtgattttgcgtacatggcgtgggttcacgatgaaatacaagtggcctgccgtaccccagagattgcacagcaggtgattgacattgcacaacaagcgatgcgtaacgttggggaacactttaagttccgatgccgtctggatacagaaggtaagatgggtccgaactgggccgtatgtcactaatactatacaggagatttatcatggctatgactaaacgtgtgcgcgtaacatttgactctaagtttgtagcaggtacgaatgatatcaacgagttcgctaagacacttgtgagctactctaagcgcttcatggagggtgataataccctaaaaggcgaccagctggctcttgcagagatggcggcgaaggaaggtgtagaggctgctgtggaactgtctatcaaaatgtcctactcaaaagttatcaagagtgaactagctgacgactgcgtgacagtctccaacattcgaatggagattaaacagtgagcgagtacctaaaagttctggcggccctcaagggctgccctaagtccttccagtcgaactacgtgcggaacaacgctgcgttagtcgctgaggctgcgagccgtggtcacatttcgtgtctgaccatgagtggtcgtaatggtggcgcttgggaaattaccagtgccggagtgaaattccttaagacccatggaggttgtttatgaaggactttttaggccaagaggtatcagtaggtgaccgcgtggtaattacctcgtatggtggctacgggctgtctaaaggtaccattgagaagataaacccaaagaccgtagtggtgcgcacaagtcccggaaagtacgggacaactcgtaagggacccgagtatttcgtaaagattcaggaggtgaccagtgagtaagcgaatggtgttcgtacatccgttgcaacctaaatcacactggaaaactgctggtggcatcgtctggttttataaggatggctacatgctacgacagtcccatgtcacccacaaggaccttcacgacccgaagatggggtttaaattcaaggagttaacgaatgagtaagcacacattgttatccttcagtgactaccgggcgacccagaagattaccaagggtgtccttgtgatggatggtgactggctggtattccaagccatgagtgccgctgagttcgatgcctcgtgggaggaggagatttggcaccgttgctgtgaccacgctaaggctcgcgagattctggagaactccattgaatcctacaaagggcgcaagaaggcgtggaagaatgcagacgttgtcctagcgttcactgaccgtgtcaactggcgtaagctgctggtggacccaacgtacaaagagaaccgagctgtcactaagaagcctgtgggttacttcgagttccttgagtccgtctttgagacctacacgtgcgtccttgagcctcagctcgaaggcgatgacgtgatgggtatcatcgggtctaaccctctcgtgtataactacgagaaggccgtgctggtctcctgtgacaaggattttaagaccatcccggattgtgatttcctgtggtgcacgactggtaacatcctcgttcagactcaggagaccgctgactactggcacctcttccagactatcaagggtgacatcaccgatggttacggtgggattcccggatggggtgataccgctgaggacttcctcaaggaaccattcattgtggagcctgtaacgtccgtactgaagtccggtaagaacaagggccaagaggtaaccaagtgggtgaaacgcgctcctgagccgggagagacgctctgggactgcattaagtccattggggccaaagcagggatgaccgaagcggaagtaatcaagcagggccagatggctcgcatcctacgttctgatgagtacaacatcgagactggggagattactctatggcaaccgggcagttaattctcatcgtcctgaccatgggcttaatagctcgtggtctctggatgttggccttagttatcaagcagatagctgaccacaagcgcaagtgataaactcatgggcactaattaggtagcactatagggaagtgcccattatgattattacttaaagattacttaaagaggagactcaaatgttaaaacctatagagcatatccttaacaatcctaatgaccttcctgacgtaccgcgagctgtcaaggagtacctacagtctcgctacaatgctgacttcctgtatcaatcagaggtccgtaagctgcgtgaggctggccacagcgaggagttcatctccggggtactgtacggtcactacatggcttctcgtgtccttgacgagatggagggacgccagcgtgcactcaaagaaggagattgattatgtgtttctcacctaagatgaaagcacctaaggttgacacaacgactgtccctgagccagctccgctaaccgaggaacctaagggtgtccagtatggtggcgacgaagactcaaacagcaccactcctgaggtgtcagggcgtaagtcactcaaggtgaccaagacgaccgagcctacagggtccgtcagtaaaatccgtaagtcagctttaggaggctaacatgggactgttcaagaaaatcaagaaggctatctccaaggtagtcaaagcgccactcaaggccgtgggtctggcagcagatgcacctaacgtgcagacagccgctgagacacctgtggccgcacctcaggaagcaccaaaagaggtcgtggaggacgttgagtcttcagcagacaccgagtctggaaggaagaaatcccgagcgtctggcaagaagtccctctcagtttcccgcagctcgggcggtgggattaacttatgattggttacggggagggctaacaaatggcagaagttaaactcgaaggcttcgcagaggagggagccaaggcggtatacgaccgtctgaagaacgaccgacagccttacgagacacgagcagagtcctgtgcgcagtacacgattccctcgctgttccctaaggattccgataacgcatcgactgattacacgactccgtggcaatccgtaggtgctcgcggcctgaacaacctagcgtccaagctgatgctggccctgttcccgatgcaatcatggatgaagttgaccattagtgaatacgaagcgaagaaccttctgggtgacgctgagggtctcgctaaggtcgatgagggcctctcaatggtagagcgaatcatcatgaactacatcgagtccaacagttaccgagtgactctctttgagtgcttgaagcaactgtgtgtggccgggaacgcgctgctgtacttaccggagcctgagggttatacccctatgaagctatatcgactgaactcgtatgtggtacagcgagacgctttcggtaacgtactccagattgtcaccctagacaagattgcgtttaacgctctccctgaggatgtccgcagccaagtggaagcagcccaaggtgagcagaaggaagacgctgagattgacatctacacccacgtgtatctgaacgaagccggggatggttactcgaagtacgaagaggttgccgaagaggtagtaccgggcagcgaagctgagtaccctctcgaagagtgtccatacattccggtccgtatggtccgcatcgacggtgaatcctacggacgttcctacgtggaagagtatctgggagacctcaagtccctagagaacctccaagagtctatcgtgaagatggcaatgattaccgccaaggttatcggtctggtagacccagcaggcatcactcaggtccgccgactcacggcagcacagtctggtgcgttcgtaccgggccgtaagcaggacattgagttcctccaattggagaagtccggtgactttaccgtagcgaagaacgtaagcgacaccattgaggctcgcctctcgtatgcctttatgctcaacagtgcggtacaacgtacaggtgagcgagtcacagctgaagagattcggtacgtggcttcagagctggaagatacccttggcggtgtctattcgattctctcgcaggaactccaactgcctctggtacgagtgctcttgaagcagctacaagccacgcagcaaataccggagttacctaaagaggccgtcgagccaactatcagcactggccttgaggctatcgggcgcggtcaggaccttgacaagctggagcggtgcattaacgcatggtctgcccttaaggctctcgaaggtgatgatgacctcaacttggctaacctcaagttgcgcatcgctaacgctattggactcgacacagctggtatgctgctcactcaggaagagaagaacgcccttatggcacagcaaggtgctcagattgctacacagcaaggggccgcagcattgggtcaaggtatggccgctcaggctactgcaagtcctgaagcgatggccgcagcggctgattcagtaggtatgcaaccgggcatgtaattaggtagcactatagggagaccgaacgtaagaccactcaagccgaccttagggtagccattgagtgaacactgctagtaagtctccgcttagtcttaactttaaggagattgaaatggctggcgaatctaacgcagacgtatacgcatccttcggtgtcaacagtgctgtactgactggtagtacaccggaggagcaccaagaaaacatgttggctcttgatgttgctgcccgtgatggcgatgatgcaatcgagctgaacaccaacagtgatgacccgtatggctccgatgtggacccgttcggtgaacctgaagagggccgtatgcaggtccgcatctccgctgacggttcagacgaagagtctaccgaaggtgaagagggttctgaagaagaacagcatggcgacgaagggagtcagccggaggaagtaaccgacgatggcgaacatgaagagttcaaaccgattggtgaaactccggctgacatcaacgaagcctctcagcagctggaagaacacgaagctggctttaacgacatggttgccactgcaatcgaacgcggtctctcacaggatgctgtgacccgtattcagcaggagtaccagaacgaagacagtttgtccgatgagtcctaccgagagttggccgaggctggctacagcaaggcgttcgttgatgcgtacattcgtggtcaggaagctctggtcaaccagtacgtcgagaaagtgatggacttcgttggtggccgcgagcgcttccagcaggtctacggtcacatgaagaccaacaaccctgagggtgctgaggcactcatcaaggcttttgaatcccgtgacgtagccaccatgaagacgattctgaacctagcgggacagtctcgtgataaaacctttggtaagaaagctgagcgcactattaccaagcgtgcaaccccagcgaaacctgcggcccgtaaggctgaaggcttcgagtctcaagctgagatgattaaagctatgtctgacccgcgttaccgcaccgactccaagtatcgtcgtgaagtggaacagaaggttatcgactctaagttttaattaggtagcactatagggagagccacgatacagtaaccttacgtgtccctctggctccctagagttacacaatgagtatcacctcatttcaagtagtaacttacgcgaccttagggcaagaccttatgataggcgcggagaatcacccaagagcttggcaacgataggcccgtctggtcagcgtaatgactaattctattcgtaaacaacataaggagattcaacatggctaacatgcaaggtggacagcagctcggtactaaccaaggtaaaggtcaatccgcagcagacaagctggcgctattcctgaaagtattcggcggtgaagtcctgaccgctttcgctcgtacctctgtgacctctaaccgtcacatgcagcgtcaaatcagctccggtaagtccgcacagttccctgtgattggtcgcaccaaggctgcttacctgcaaccgggcgagtctctggatgacaagcgtaaagacatcaagcacaccgagaagaccattaacattgatggcctgctgactgcggacgtgctgatttacgacatcgaagacgcgatgaaccactatgatgtgcgctccgagtacacctctcagattggtgaatctctggcgatggcagctgatggtgcggtactggccgagctggccggtctggttaacctcgctgattccgtcaacgagaacatcgctggtctgggcaaaccgtccctgctggaagttggcgctaagtctgacctgactgacccggtcaaactgggccaagcggttatcgcacagctgaccattgctcgtgcggctcttaccaagaactacgtcccggctaacgaccgtacgttctacaccactccagacgtgtactctgcgattctggctgctctgatgcctaacgctgcgaactatgcggctctgatcgaccctgagcgtggttctatccgtaacgtgatgggcttcgaagtcgtcgaggttccgcacctgaccgctggtggtgctggtgatgaccgcccagacgaaggcgcagatgcgaccaaccagaagcacgccttcccggcaactggcggtaaagtcaacaaagagaacgttgtaggcctgttccagcaccgttccgctgttggtactgtcaagctgaaagacctcgctctggaacgtgctcgccgcgctgagtatcaggctgaccagattatcgctaagtacgcgatgggtcacggtggtctgcgccctgagtctgcgggtgcgctggttttcacggcggcctaagcgtaaatacctttagtgctcgggtggtaactccacctgagtacgaggtacagactgtagccattgatggtgattcacttaaggtggcactcgatgggctggagggagtaacggactggtcaacacttgaggtaacttatggtacttcagggattgtcagccatactcgccggaccaacacgctgtacttcaaaggaatcgctgtaggcgaaactctggtgactgtcagttttgacggttccgaaaggaagtcctttaagctgatcgtgactaactaataagccaaaccccttggggaccactcacggtctctgaggggttttttcgttaggagcttacattatgaacatgcaagatgcttactttgggtctgccgctgagctggatgctataaacgagatgctcgcagctatcggtgaatccccggtgaccacccttgacgaagatggtagcgcagacgtagcgaacgctcgccgtatcctcaacaggattaaccgccagattcagtctaagggttgggccttcaatatcaacgagtcggccacactgaccccggacgcagacactgggcttatcccattccgtccggcatacctgtccatccttggtggccagtacgttaaccgtggtggctgggtgtacgataagtccacagggacagacaccttctcagggccgatcaccgttaccctgattacccttcaggattacgacgagatgcccgaatgtttccgccagtggattgtcaccaaggccagccgccagttcaactctcggttcttcggagcggagggcgtagagaactcgctggcacaggaagagatggaagcgcgtatggcgtgcaacgagtacgagatggacttcgggcagtacaacatgcttgacggtgacgcatacgttcagggtctcatcggtcgttaatcagaaacttaaggaggaccaaatggctctcgtatcacaatcaatcaagaacctcaagggaggcattagccagcagcctgaaatcctaaggtacccagagcagggtacacttcaggtcaatggttggtcctccgagactgagggtctccagaagcggccacccatggtgttcatcaagtccttgggaggacgtggatatcttggggaagacccctacatccacctcataaaccgtgacgaatacgagcagtattacgccgtgtttacagggaatgacgttcgggtattcgacctgtccggctatgagtatcaggtccgaggggaccgctcgtatgtgaccgtccataaccctaaggacaacttgcggatggtcactgtggccgactacacattcatcgtgaaccgtaccagacaggtccgtgagagtcagcacttgaccaacggtggtaccttcagagataacgtggacgccctcattaacgttcgcggtggccagtacggtcgtaagcttgaagtgaacattaacggcgtgtgggtcagtcaccagctccctccgggtgacaacgctaaggatgacccaccaaaggtagacgcacaggctatcgctgaggccatcgcggttcttctacgcgcagcgcaccctacgtggacgttcaatgttggaacagggttcatccactgcatcgctccagcaggtaccaccattgacatattggagaccaaggatgggtacgccgaccagttaatcaatccggttactcactacgtccagagcttctctaagttacctctgaacgcaccagatgggtacatggtgaagattgtcggggacacatccaagactgctgaccagtattacgttaagtatgacaagagtcagaaggtctggaaggagaccgtggggtggaacgtatccataggtctggactatgtgactatgccgtggactttggtacgagcagctgacggtaactttgaccttgggtatcacgattggaaggaccgtagggctggcgatgatgacactaacccgcagccgtccatggtaggctctacgattacagacgtgtttttcttcaggaaccgcttagggttcatctctggggagaacattgtgatgtcccgtaccagtaaatacttcgagttctacccgccgtcagtagccaactatacggacgacgacccgcttgatgttgctgtgagtcataaccgggtgtcggtcctgaagtatgctgtgagcttcgctgaggagcttctactgtggtctgacgaggcacagttcgtcctgtcggcaaacggtgtgttatccgctaagacagcacaactggacctgaccactcagttcgatgtgtcagaccgtgcgcgtccttatggtatcggtaggaacatctactatgcagctcctcgcagctcctttacgtccatcatgcgttactacgcggtacaggatgtaagctccgtgaagaacgcagaggacatgacggcccacgttccgaactacatcccgaacggtgtgtatagtattaatgggtcaggtactgagaacttcgcgtgtgtactgaccaaaggtgctccaagcaaggtgttcatctacaagttcctttacatggacgagaacatccgtcagcagtcgtggtcccactgggacttcggggatggtgttgaggtgatggccgcaaactgtatcaactcaacgatgtacatgttgatgcgtaacgcctacaacgtgtggatagctgctgttgactttaagaagaactctacggactttccgttcgagccttacaggttccacgtggattccaagaggtcataccgcatctcagagactgcgtatgacattgagacgaaccagacggtagtgaacgtcaaggacatctacggtgcgtcgttctctaagggtaccgtggcaatctgcgagagtgacggtaaaatcaccgagtacgagcctacgggttcctcttgggattcaaccccggacatccgcattagcggcgacatctccggtaaggacattgtcatcgggttcctgtacgacttccagtatgtgttcagtcggttcctcatcaagcaggagcagaacgacggcacaacgtccactgaggactctggtcgcctacagctgcgcagagcgtgggtgaactatcaggacactggcgcgttcactgtgagcgtcgataacggtagccgtgagttcaactatctggtaaacgccagagtaggctcgacaggtcttcgtctgggccagaaggccacaaccactggtcagtatcgtttcccggtgacaggtaacgcgctgtatcagaaggtgtccttgagttccttcaacgcttccccggtgtcgatcattgggtgtggctgggagggtaactacagcagacgcgctaacggtatttaactaaatgtctccctatagtgccgctcaattaggtagcactatagggagaccacactaagaggggacttaaagcatgtacataagaaacactgtaagtaatgacttcgagttattcatcccggcctaccatgacgtacttgaggcgcaggccatgggtatagaaccatcgttcccagcggttactgagtgtgtcacgttagaccacgatggttttcctttggctataggtggacactgcggagaccagtgctggttcgtcacgagcgaccaagtgtggagactcgacagggctggtaagctggagttccgtgagagaatcatggagtacagggacatgttattaaatgtttatccatccctgtggaacttcgtgtgggtcggtaacggtccacacaagcggttccttaagtccatcggtgctgtattccacgaggagtacactcagggtgggaagttccaactgttcaccataacgaggaggtaactatgtgctggatggcagctattcctattgcaatgacggctgtgcaggccatcggtcagtcgcgcagcgaagccaagatgattggccttcagaatgaccagatgcgccgacagtccgcccagatgattaaagagtcaaacattcagaacgctaacgccagccttgagcaaaagcagaagctggaagaggctagtgcagacttgaccgctaagaatctcgacaaggttcaggccatgggtacaatccgtgcggctatcggagagggaaaccttgagggtgccagcatggaccgtatcagtcgcatcgaagagggcaagttcattcgggaggccaacgcggtcaccgataactaccgtcgagactatgcgtcactgttcgcccagcagctgggtaactccgagtcaactattgaccaagttaagtccatgcagaaggctgagggcaaaggtaagtccaaactggaacaggtgctggacccgctggccttaatgggttcgcagggtgcctcagcgtatgcttccggtgcgttcgatagcaagggcaccaaggcaccaataagtaaggcccaaggtactaaggtaggaggtaagtaatggccagtaaattagaacaagcattaagccaactcccacaggccgggtctacccgaatccgtggcggctcagcgtccatgcagtatcgcccggtgaccatccaacaggaaggtgccagacagtccaacctagtgcagtccttggcgaagtttgggacagcagtaggagaagcagcggacgcatacgacaagcgccagcgagacaaggctgacgagcggtccgatgagattatccgtaagttgaccccagagcaacgtcgtgcggccatccagaatgggaccctgctgtatcaggatgacccgtacgctatggaggccctgcggttcaagactggccgtaacgctgcgttcctcatagacgacgaagtggcacagaaggttcagaacggtgagttccgcactcgtaccgagatggaagagtacagacacaagcggttgaccgaaggtgccaacgagtacgctgagcagttcatgattaaccctgaggactctgagttccagagagggttcaatgcgaacatcaccgagcgtaacatctcactgtatggtaagcacgatacattcctgagcgaacaggcacagaagggtgccatactggcctcgaaggtggagctgtcaggcgtgcttaaagaccctgccgttcttgcccgtccagagtccggtgagttcttccagcgctacatcgacaacgcgattaagaccgggagtatccctagcgacgctcaggcacaacaggtcatcatcgggtccctcaacgacgtcatccagcgtccgggtgcgaccaacttcttgcagagccttgagggccgtccggtcacccttaacgggatgaccacgacctacaaggaacttatgggagaggagcagtggaatgccctgatggtcaaggcccagtcaacccagttcgacaatgacgctaagttgtccgaaggtttccgccttgggatcaccagtgcgttgaaccaagacgacaccagcaagggctgggagatgcttcagggtgccaaggcagaactggatcgtctgcaacccggtgaacagatgacacccgagcgtgagcgcctgattcaagctgaggaacagatgcaggcccgtttccgtcaggaggcccaagcggtagccaaggagatggacaagcgtcaaaagaccattaacaagaatcaggtcatcgaccagcagttcaccaaacgcatcaacgggcagtatgtgtccaccagctacaaggacatgccgaccaacgagaacactggcgagttcactcacagtgacatggtgaattacgctaacgggaagctggctgagattgaccagatgcagctcacggagcaacagaaggaccgcatgaagctgagctacctacgggcagactcagagggtggagccttccgtaccgttgtaggccagatggtcaccgacgctgggtctgaatggtctgccgctgtgattaacggtaagttgccagaggacaccacggcgttgaacaagctgcgcaccatgcgtaacaccgacccggacctcttcgctgcactgtacccggataaggctgacttgtttctgacgatggacatgatggacaagcagggtattgacccgcagattcttatcgacgctgaccgttcccgccgcagtctcaccaaggagatgcagtatgaggatgataaggcgtgggcgtccctgaagaacaactcagagtccccagaactgtcccgtatcccagcaagtctggatggtatggcccgtaagatttatgacagcttcaagtaccgcacaggtaacagtgatggtgccatgcagcaggtcgataagttcctcaaggaatccactgtgaccttcaaaggtgatgacatggacggtgataccattggtattatcccgaagaacatcctacaggtcagtgatgaccctaagagctgggagcaaggccgagacattctcgaagaagcccgtaagggaatcattgcggctaacccttgggtgacaaacaagcagctgacgatgtaccagcagggtgactctatctacatgatggacaccactgggactgttcgcatccgctatgataaggagctactgactcgaacctatcaggaacagcagcagcgactggccaaggaagccgaagagaaggcactgaaggaagcaaccaagcgtgcacctatctccgcagccactcaggcccgtaaggcagctggtgagcgcgtacgtgcgaaacgtaaagccactccgaagttcatttatggaggtggcgatgagtaaacaataaggagacaacatgagctacgacaagtccaaacctagtgactacgacggtatgttccagaaggcagcagacgcacacggtgttagttacgacctactgcgtaaactgtccttcaacgaatcatccttcaaccctaaggccgtctctaagactggccctaagggcatcatgcagttcaccaaagcgacggcccggagcatgggccttaacgtgaccgatggtgatgacgatgggcgctacaaccctgagttagccattgatgctggcgctaagctgcttgccagtctcgttaagaagtacgacggtgatgagctgaaagcggccctagcgtacaaccaaggggaaggcccagcgggtgtccctcagctccaagcgtacgacaagggagacttcaggtctatctcggaggaaggtcgtaactacatgcgcaagctgctggatgtggccaagagtccgaactcaggcgcactggaggcgttcggtggtatcaccccaaagggtaaagggattcccgcagaggatgccttcaagggcatagctaagactggtaaggtaggtactgagctgccggagtcccatgggttcgacgttgaaggtgtagcgcaggaagcgcccaacacgccatacgctaaggacttctgggagaagaccgggacgactctcgacgagtataacgctcggtcaaccttcttcgggttcggtgacgctgctgaggctcaacttcagaactcaaccttgggtgtggccttccgtgctgcgcgtgctgatgatgggtacgatgtgttcaaggacacgatgaccccgactcgctggaactcttacgtcccgtccaaggaggacttacagaagctgcgggactccgggttacctccgagttactacggtgtggtgactggtggtgacggtgagaactgggatgcgctcatcaagctggccaaggataactttgaggctgaccaacgggccgctgaggctggtactggggcgaaactcgctgctggtatcgttggtgctggtgtagacccgctcagctatgtccctctggtcggtgtggccgggaagggactcaaggtggtcaataaggccctgcgagtaggtgcacaggctggagcactcagtgttgcctctgagggaatccgtacgtcagtagctggtggtgaagctcactacgctgatgcagcacttggtgggttactgttcggtgctggtatgtcggctctcagtgatgctgtggcggctggtatccgtaaggctcgtggagtcgagtctgtgaatgagttcgctggtccggcactccgtatggaagcacgagagacagccatcaacactggtggtcacgatacctctacactacctccagataacttctcgttcgagcagggccacggaggcgttccatttgctgaccacccaaccgaagagggcgcagtggttcttgccaatggttccatcctgagcgacaccaacccgcttaacccaaggacccagcgtgacttcgcagagatcgacccagagcgtgcagctcccggtatcaaactcggtgggttcactgagattggtctgaagacattagggtccaaggatgctggtgtacgtgcaatcgctcaggacctcgtacgctctcccacagggatgcaatcagggtctagtggtaagtttggtgcgaccgcttcggacatccatgagcggctccatgcgactgaccagcggatgtacaaccaactgtatgacgctgttgaccgtgccatgaaggacccagagttctccattggtgagcagaagatgtcacgcagagccatccgtcaggaagtctacaagcgtgctgccttggcgattgagcgtccagagttacaggctgatttgaccaaaggtgaacgtgaggtgatggacctactgaaagagcacttcgataccaagcgtgagctgatggaacagccgggtattttcggtaacgctaacgctgtgagcatcttccccggtagtcgccataagggaacctacatacctaacgtgtacgataggggcgctaaggagctgatgactcagaaactaggcggacctgaaggactccaacaggcaatcgctcagagctggctcaccagttaccgagtgcgtcctgaggttaaggcacgtgttgatgagtacctcatggaactcaacggttacaagtcggttgaccaagtgacacctgaggtggtccagaagcacgctatggataaggcgtacggtatcagccacactgaggacttcacagcgtccagcgtcattgacgacaacatcactggtctggttggtatcgagaacaactcgttcctcgaagcccgtaacatgttcgacagcgacctcccggttaccttgccggacggttcaaccttcagcgtcaacgacctgcgggacttcgacatggcacggattatccccgcatacgaccgccgagttaacggtgatatctccatcatgggtggtagtgggaagaccactaagcagctcaaggacgaaatcatggcgttagacaagcgggccgagcgtaagggacaactgaagggtgaagtggaagccctgaaggacaccgttaagattctcactggccgcgctcgccgcaacaatgacacagcctttgagacggctatgcgctccttgaatgacctagcgttcttcgctaagaacttctacatgggtccgcagaacctcacagagattgctgggatgttggctaagggtaacattaaggcgatgcttcacggtatcccaacgttgcgcgacctcgccaccagaacctcccccgtgtcgggtagtgaactccgcgaactccatggggcgctgttcggtaaggaactcgaccagttaatccgtccggggcgtgaggacatcgtgcagcgaatccgtgaggcttccgataccagcggggccatggcgtcagtcattggtaccattaagttcggtactcaggagctgtcggctcgttctccttggaccaagatgctgaacggtacggccaactacattctggacactgcccgtcagggtgtgcttggggatgtggctggtgctgccctcggcggtaagggttccaagttcggtaaggagaacttcctcaaagctgcctctatcagtccagagcagtggaagggcatcaagcaactctttgttgatcatgcgactcgtgacgccaacggccagttcaccatcaaggacaagaaggctttcagtcaggacccgagagcgatggacctgtggcgtcttgccgataaggttgctgatgagaccatgctgcgtcctcacaaggtgtcccagcaggattccaaggcgtacggtgctggtgtcaagatggctatgcagttcaagaacttcaccatcaaatcgctaaacgccaagttcattcggtccttctatgagggctacaagaacaaccgcgctatcgacatggcattgacccacatcatgtctctgggtatcgcagggacttactttgcgatgcaggcccacgtgaaggcttacggcctccaagagtctcagcgtaaggactacctgaagaaagccttgaacccgaccatgctgggctacgcagcgttgactcgaagttcccacactggtgccccgctgtctatcgtttcgatgatggctggtgccgctggattccaagacgccaacatgctgcgctccaccatcttacctaaggaggaacagttccagaagaaagatggagcgtccaaaggtcgagccgagtcgagcaaccttgcgggtaacttagggtctcaggtcccagcgctgggttacgtagggaacgtcattgcgaccgctaagaacgcttacggtgttgctacagcgcctaacaagccgactgagcgtgactacatgactggcctgatgaactccaccaaggagcttgtacctaacgacccgctcacccagcagctcataatgaaaatctatgaggcaaacggtgtgaccatcaagcaacagcctaaacctaactaattaggtagcactatagggagaccgcttggtttcccttctcattcactttaaggaggtcataatggaccaagacattaaaacagtcattcagtacccagtaggagagactgagtacgacatcccgttcgactacctatcccgtagcttcgtcagagtgtctctggtctctgaggattcccgaagactgctgagtaacatcacggagtaccgctacgtctccaagaccagaatcaaactgctggtttctactgaaggtttcgaccgtgttgagattcgtcgatttacctcagcctctgagcgaattgttgacttcaatgatggctctgtgctgcgagcaacagaccttaacgtatcacagctacagtcggcgcatattgcggaagaagcccgtgacgcagcccttctggccatgcctcaggacgacgcaggtaacctagatgcacgcagtcgccgtatcgttaacttggctcccggtattgacggcactgacgctatcaataaggaccagttagattcaacgctgggtgaggctggtggtatcctttctgatgtgaaagaagtacagaaggaaacctatgactacatcgagaagctcggtgatgacacttcgattgtccgtggggtaacttgggtgtacaaccaagggtctgccgttggtggcgagactactatactcatcgataaacctacccgcacgcttgccgttccttatatcgagattaatggtagtcgccaagaggttgggtatcacttctcgtttgacattgccacccagatgattaccttaacggaaccactggttaccggggacttcctgatggcaatgaccacagagtctagtgtacctctggaagaccttctggctaacccgactggtgcctcggctatcggtacctccgatggtcgaaacgttcaggcaaacatcgacgagcttcgctcagagttagacttcctgaaagacactacggtgctcgacgttcgccgttttggtgctgtgggtgatggtattgcagatgattacccgtcgtttcagaaagcgtgtatcgctgcgagccaacttggcggggcaatagtccatgtaccgaccccaaaggtaaaatggaagattggattcccggtatacttgttcgaccgaacttgggtccggggtacaggcatcaactgtattgtagagttcactgacccgctgtatgcacgcaagtcccgctctgggttcgtcattgggtctggttacgaacagaaccgcgacaaggccattcagtgtcttaacgatggcacttgggccactactggctcggtggtaaatagggacttcgttgaattggaccgagggcagtacgtacgcgacaaccctagcaaggtccagtcgagactgtgccgagtgtccgggatgtacctgaaagcttcgtacccgaacggtgctaccctgaagggcggctacgctgtgtctggtgccaacgcggtagactcagaggtatttgacatttggggtgaaggttggactgagattatcaacttcgggtctgacgtaccgccagctacgccaagttgtcacaacctccatgcgtacgacatcacgtgtgttgctcctaacgactacgagacgtactacagcgcagggttcattgcgaactctacaagctgctctattggccgattcaagcagctcagggcaatagctgatggttctcctcacggttcctgtggttccatgaactacaccgagtattgctccttctatgatatcgacgtaccgagcttaggtcgtacagcctcgtctgagggtatccttgtgaacaactccaagggcgctgtgactcgtaacgttcgtattggtaacgctaagaccggggtggccgagtattacaccactggtgctggtatcttctacgacagagaccaacccaacgtgttcgatagtatccatgcgaataactgtgacaacgcggtagctctccgctccaagttctcggtttggaagaacgtgacgcagaccaactgtacctatcacgtctacttcgggacgaccaacgcacaagcctgtgtggtcaagttcgtaccagacacaatcggtggtggtaataacgtagacattctggacagactccgcgacaacgtggttagtggctggcgtgttcgctccctccacatccgccctatcgcctacctactgaacgacaagtcagtactgcgtagctgggatgctggtaagaacatcaaggctgagaacggtgtgggattccagtggttattccctgtaccacctaccatgcgtgcaatcactcaggtcagccaatggtttaccttcgaggttggtgcggcggcggccgggacagaggtcaaggttcaggttcgccgtatgtcagcgtacaacggagacgccaacgagcagcctgtaatcctctttgagaacagccgcaaggcctctctggataccgtacaggcgactaacattgtggccaactcctcaggtctggtcctgacgtaccctacggatggactggctaacgctgtggatgtcctcgtgagcgttacagcaccgaccgttaacttcaacatgaaagaggctcgcatcacgtatctgggcgactaactaaggagacagtatgttaaacaaattgaatcaacctaaaggctctacaatcggtgttctcaaggatgggcgcaccgtccaagaggcaatcgacgagctggagaagattaatacccgaaacgttgaccctgagcgcttccgtgagacactgacatcaagtgatgatgaggtgttcgagaagatgttcgcgtggttggccactcagtcagacgttgtgggaacctcaagttcttcctatatcacagccttacctcgcatgattgagcttagcggtcgtacctatacgttgactaagcgtcacgtgctggacggtaactttggtattcagaacggtactatcctgatgtccggtgagggtgagattatcatgggcctcgatgctggtactaagactcgtcgccacttccttaagtatgtacatttcgaatacatcggggcatccgaccgtagcacctctctggtcaccatggcgcgctgcttcaactctgtggtgctattctgcaacttcatcgctggcggtgataccgctcgcaacagagcacctcgtacccgttacggtctgttcgcagggtccacccgttgctggggcttccagttaatcggtggtgagtattacggtggcgactgtgcgttgcgtgttggacgcgctaacgaccacactgggttgaccattcgtcccggtacagttcaccactctcgcgttatcaacatgatgctgtgtaacccggcaggtgccgaggtgtctggttgtaacattgaacatgcagacaacggtgcgattggcttagggattacctcgggtaccaacacctcaggtaacgcagcccacggtgttcgcatcaacggtgtatacttctacaacaacggtaatggctccagtggctcaaacgtagcacctgcgaatatcctcattggtaaggacattccgggaaccgaaggttgggaccgaccgggagagttgattacgtcgagtcgaaacaccgcgcacagtattacagtgtcagagtgttatatcgtcagcccgaacaccgagaacgcttggcaggttaacgccctgtacggtgtgtccttcttggacaacaaagtgggcctcaaaggtgacgctacgattcacggtgtgtatgacggtacatgtgctaactgctgggctgtaggcaaccgagaccaaggcggcaaggtgttccagttctcctctacagcaaccaatgcgattctgactaccagaaagggtaagtggactccgaagattatcggtgagggtacagcaggtaacacgactctaagtgcttctggtggtgcgtactcgctggataacggaatggtgaccgtgtcgtgcttcgcagtggtagacgttaaggaccctaacatggctgggaacctaaacatcaaactcccggtagcctgtgaggaccagcagcggggcggtacaggcatatcgttgacgaacgtcccagacgtgccgagcccgaatggtagcatcattgtgataggagacaccgctagaatcatgctggggtctgcgcgattacagccagcgaacgtcacgactggtaccgccatccacttctcggtgtcctacccggcagacgttaaggtataaggaggtgtaaatgttatccctagacttcaataacgaagttatcaaggcggctcccattgcgggggtcgctggggccgatggtgtagcgaggctcttttggggcctctcactcaacgagtggttctacgtcgcggcaatcgcctacacagtggttcagattggtgccaaggtagtcgataaaatcattgactggaagaaagctaataaggagtaacatatggacctgattaagttcctcgaaatgttagacactgagatggctcagcagatgctcatggacctgaagaatccagagaagaggacccctcagttgtacaacgccattggtaaactacttgagcgtcataagttccaaatctctaagctgacccctgacgttaacatcttgggcggactggctgagggtctggaggcttacaactccaaggtgggtgccgatggtctgacagacgacgataagttcaccctacagtgatatactcaaggtactactatatgtagtgcctttatggatgtcattgcgctacgctaggcgttcctacgtgaaatctgagaaacaacgggaggcattatgctggagctcacaaagagaatcgtcccgtatcttgtggctattatggtgtttgccttcgggtggcacttggggtctcaatctacggacgcaaaatggaaggaggaagtacagaatgagtacgtttcgaagcaaacggctagagttcaaactcaagcagcacttgatgagatatcggctaagtaccaagcagaccttgaagggctggagggcagcactgataggattattgctgatttgcgtagcgacaataagcggctgcgcgtcagagtcaaacctaccagtgtacccgcaggaccagacggtcgatgcctcgttgatggttccgtcgaactacacgaagcaactgctcgaagtcttatcgcaataacccagaaggccgacctcaaagagaaggccctacaggacactattcgcaagctacagcggaaaggaggtgaacattgagtaactctcagcaagccaagaacgccttaatcattgcgcaactgaagggtgactttgtcgcctttctcttcgtgctatggaaggccctgaacctgccggaaccaaccaaatgtcaaatcgacatggccaagtgtctggcagaccccaagaacaagaagttcatccttcaggctttccgtggtatcgggaagtcgttcatcacgtgtgcgttcgttgtgtggaccctatggcgtgaccctcagttaaagatactgattgtctcggcctcaaaggaacgtgcggacgctaactccatcttcatcaagaacatcatcgacttgttgcctttcctgagtgagcttaagcctcgccccggtcagcgtgactccgtgattagctttgatgtaggccctgccaagccggaccacagcccgtcagttaagtctgtgggtattacgggtcagcttactggtagccgtgctgatatcatcatcgcggatgacgtggagattcccggtaactctgcaacccaaggtgcccgtgagaaactctggacattggttcaggagttcgccgcactgttgaaacctctacagactagccgtgttatctatctgggtacccctcagaccgagatgacgctctacaaggaacttgaggacaaccgtgggtactccaccatcatctggcctgcacagtatcctcgctccaaagaggaagacctgtactatggcgaccgactggctcctatgctccgtagcgagtacgatgaggacaaagagggcctcagtagtcaacctactgacccggtgcgattcgactctatggaccttcaggaacgtgaggtggaatacggcaaggctggctatacactccagttcatgctcaacccaaacctcagtgacgccgagaagtaccctctacgcctccgtgacgctatcgtgtgcggtctacagatggacaaggccccaatgcactaccaatggttgccgaaccgtcagaatcgcaatgaggagcttcctaacgtgggtatgaagggtgacgagatttactccttccatacagcctccagcaacactggtgcgtatcagggtaagattctggtcattgaccccagtggtcgcggtaaggatgagactggctggtgcgtactgtacaccctcaacggttacatctacctgatggacgctggcggtactcgtggttacgaagagaagtcccttgagttcctcgccaagaaagccaaacagtggcaggtgcagacagtggtcttcgagagtaacttcggtgacggtatgttcggtaatgtgttccagcctgtgctcctgaagcatcacccagcgcaactcgaagagattcgtgctcgtggtatgaaagaggcccgcatctgcgatacacttgagcctgtactagcaagccaccgcttggtaatccgtgacgaggtcatccgacaggactaccagacagcacgtgatgcagacggtaagcacgctctgaagtacagcctgttctaccagatgacccgtatgagccgtgagaagggagctgtggcacatgacgaccgacttgatgcgttagcattgggtgtcgagttcctacgctctacgatgcagcaggacgctgtgaagatagaggctgaggtacttcaggagttcttggagcaccacatggagaagcccctgagtaacatctcccagttcagggccaccagtagcaacggtgtggacatccgatgggaagacgacggggatgactctatgttcatcgcatggtgattatgcagggattgtgcataaggattcattaggccacggagggccacttttggaaaactctaagtataacagacacttggaattaggtagcactatagggagagacccaaggttacatactataagactacttaaagtttcattcatatagatatgcactttaagtctccttaaaggcagagggtagtgatgataatatcaccctctcactataagacactaagagctaacacaaggaggacctatgcgcttactgttaaccttactgcgccataggactacttggcgatttctgctggtacttgctggtgcccttggggcttcactggttactcagcagcaactcagtggattggagactctcgtgtgctctctactcacttgtagcgattagggtcttcctgacgcgctagggattccgtagtgatgcttatcagcatacaccactccatccctctacagtcaatacttaaagttaaccttaggtgattcactgggtctacctacgggtctatgcactgacctgaggaatacctgaggttacctttaagaattttacataaagttctgagtgtatatctcacagtttaaacttttggttatccccccccggtaccctctcagtccaccaaaagtaaccataggccaccataaaccttcggtttaaccttaggtgggactgatgggaatcattaggtgatactatatgttgtggtgagtgggaccttgggatactatatgttgatgtctctgtgtccc

SEQ ID NO: 7 - DNA, 41279 bp, Unknown
  source: /note="Description of Unknown: KP3W-P0107 Bacteriophage sequence"
tatctgttgatactctccaagtatcctccaagtcatacctgaggagccaacctgaggttagacctgagaccatataccttaggttaaccatgtgaccatccagcgagtcatcactataaaggttattcagtggtcagtgtcaatatactaaacaattaggtatcactatagggagacactttaagtattactaagagaccatcaccataaagataactatcactataggtctacataaagtttaacttaaggtattgacattcagaatccgttatgagacattagcaaccgttgagagacacaacgtcaccagcaaccagacaataccacgagttatctggttagactgagggtctcaagtagtcatcaaccggacatacgaaagtggttgactcaacgatgaacaagtagtaagatgcaccacagattcacagcaacgaagtatcgctctttaacaatatggattaatcgctgacatgtacatcactcatcacttagtgtttaactagtggtcacattcaggtctctggcaaggtacgtcctgtcatcctgagagtggccacgctgataaccactaacatcgaggatatacaccatggaaatcgtaatgcaggcactgaaccacggggtcattatgacgacagcacgggactacaccggggccaccaaatacatggtgcaatacggcttacagttcacggtgtttgactcattccgcgaggcactgcaagattacacagattgcgtcacccactcgcaagagtgtggcgactagcggttaacgacaggtcatccgagaggtggcctgaaagataaccgctaaccataggatatacaccatgattcacatgaaagaaccagccaacaaagtattcgtattcgttaccgcttaccgtggctatgagtcgctcgaagttaacgagaagatgctcaagggtctcattaagaccattcgcacctatccgggagcatacggcaacattcgtgatgagcacgtacaaggctgctttaaagaagctggtatgtctgaggcaacgcaagagcgcacgcttaaggtggaatgtaccatcaaacaagcggctgagctggcgtggttagcatgtaagacctaccatcaagacgctgtactggtggttaactcacagactcacacggcctctctgtggtctatcgaggacgtaggcgaatatcctcaggtatatccacgcttgaaagaggtgtctttaggtggcacgctgcaacaagtggatgcaccgaagggcgagtgctattcaatcatcgacgggcaatactgggaggttgtttaatgatcacctactacgtgtacgtcaaccaaatggaatacttcgaagtagatactctggaggaggcgataagactgtgcgactctgtaccgggctcacatgttgaggatagcgtgttagatgaggtgatttatgcaaatagatagtgaggttacagtacacggaatcaccaaagagaagctggagttctaccgcttccgcatggtggcgtgcggtcgctcccacgattacctaatggcccaactggccaaaacctatagaactcgcaaggtgatgtatgctaatcgaatgcaacaatcttgataactttctggataccgtggcgggcctcgttaagcgcggcctcatgttcacctcgaacgcctcagcactgaccataacgttaaccggaggctactgagtgctaaccctatttgtgctcttcgtgtactcgctgatagtcctgtacttccttagggactttcgcaagggtcttaaggtacacagggcaacactaagctactttaagtggggcttcgtgcctcgctttactgtacggctacctaatggccgctttaaggcaaacaaggtaggcattttctacatcgcaacccattgacacgtcataaggaaacacacaatgaactacaccgacatgcaagaacgcttagacgtcatccgtaacctgtcaatctgtgaactcgacaagcgccaaccgctgctggtagcactcatcgcggacattgtgaactgcgagacgtccgatggttacgatacggacagcgattggggtcttgaacgtcaggactattggcaaaccatgaagattaaggccaaagatgctgggtttaacctgctgggcaatggccacttcagcgcagcgtttaagcacgagctgctaccgggtagggtcattaaggttggctttaagaaagaggactcaggggccgcctacgtggctttctgccggatgcatcaaggccgggtagggattcctaacgtctatcacgtagcgcgtcacgctggctgctatacggtggtactggatgagcttgagccttgtcaacgcttcgagaacgaggtgcacgagcattacgcagaccttgcgagctactttgtggagaactctggtgcagagttgggcgatgttgacggcgcagagaaggaattacccttcgtcgagacatgtcaaatgattaacaagttcttctacgggattgcatccttcgatatgcacagcggtaacattatgttcaccaaagacggcaagccagtaataaccgacccggtgtcattctcacaggaccgcgaacgtgagcctttctcactggaacctgaggaactgctcgcagagattgagcagatagcgcacgccaagatgattgaacgctgtaagcgcaacaaggctaagcgtgacccgaacggggagctgcgcatcgcacgtcggaaggccaacaaggaacgtcgagcatgccgtaaggcacacgataggtggcgcaaggagcgcgagaggattaacgccgaggccctaaagttcaaccttgcgaaaatcgaggaacgagtacatgtatggatggctcatgagggtctagccattcagcagggtaggggccttccggttgacaactaccttcagggtagacttatgggttagcaaggtgtatcttaggtgtctccactgcgaggcaccaatagataaactttattaacgccagttcgctggcaccaaagaggcacacaatgaacgcattaaacattgcacgtaatgacttctcagagattgaactagccgctatcccgtacaatatcctcagcgagcactacggggacaagctggcacgtgaacagctggcacttgagcatgaagcgtacgagctgggcgaacagcgtttcctgaagatgttagaacgtcaggtgaaagctggtgagttcgctgacaacgtggccgctaaaccgctggtcttaacgctgcacccgcagttaaccaagcgtattgacgactggaaggaggagcaagcaaacgctcgcggtaagaagcctcgcgcatactacccgattaagcacggtgtggcctcagagttggccattagtatgggcgctgaggtgctcaacgagaagcgcggagtgtctagtgaggcaatcgcactgttaaccattaaggtcgtcttagggacgctcacagacgcctctaaggcaaccatccagcaggtgtcctcacagttaggcaaggcccttgaggatgaggcccgcttcggtcgtatccgtgagaaggaagccgcatacttcaagaagaacgtagcggaccagctggacaagcgtgtaggccacgtgtacaagaaggctttcatgcaggttgtcgaggccgatatgatatccaaagggatgctgggcggtgacaactggtccagctggaagaccgacgagcagatgcacgtggggaccaaactgctggagttgctcattgagggcactggtctggtggagatgaccaagaacaagatggccgatggctccgacgatgtgaccagtatgcagatggtccagctggctccagccttcgtggaactcctgagcaaacgagcgggagcactcgcgggtatcagccctatgcaccaaccgtgcgtagtccctcctaaaccttgggttgaaaccgtaggcggtggctactggtctgtaggtcgtcgcccgctggcgctggttcgtacccactccaagaaggcactgcgccgctacgcagacgtgcacatgcctgaggtatacaaggcggtaaacctcgcgcaaaacacgccgtggaaggtgaacaagaaggtgctggcggtagtcaacgagattgtaaactggaagcattgcccggtgggtgacgtcccggcgattgagcgcgaagagttaccaccacgcccggatgatatcgacaccaacgaggtggcacgtaaggcatggcgcaaggaggccgcagcggtctaccgtaaggacaaggcccgccagtctcgccgtttatccatggagttcatggttgcacaggccaacaagttcgctaaccacaaggccatctggttcccgtacaatatggactggcgtggtcgtgtgtatgctgtgagcatgttcaacccacagggtaacgacatgaccaaaggtatgctgacgctggccaaaggtaaaccaatcggtctcgacgggttctactggctgaagattcacggtgcaaactgtgctggtgttgacaaggttcctttccctgagcgcatcaagttcatcgaagagaacgagggcaacattctggcgagcgctgctgacccactgaataacacatggtggacacaacaagattcaccgttctgcttcttagcgttctgcttcgagtacgcaggagttaaacatcacggcctgaattacaactgctcgctgccgctggcgttcgatgggtcctgctctgggattcaacatttcagtgcgatgctccgcgattccatcggtggtcgtgcggttaacctgctgccttctgataccgtgcaggatatttacaagattgtggccgacaaggttaacgaggtgctacaccagcacgttgtcaacgggtctcagacggtggtcgagcagattgctgataaggagactggcgagttccgcgagaaggtgactctgggtgagtccgtgttggctgctcagtggttgcaatatggtgtgacccgtaaggtaactaagcgttctgtcatgacgttggcgtacggttccaaagagtttggcttccgccagcaagttcttgaggacaccattcagccagctattgataacggcgagggcttgatgtttacgcaccctaaccaagcggctggctatatggctaagctgatttgggacgctgttaccgtgaccgtagtggccgctgtcgaggctatgaactggttgaagtctgccgctaagctgctggccgctgaggtcaaggacaagaagaccaaagatgtgctccgcaagcgctgcgcaatccactgggtaacaccagacggcttcccggtgtggcaggaataccacaagcgtgaccaagcgcggttgaagctgacgtttctgggtcaggccaacgtgttcatgacgtacaacaaaggggacaccaaggagattgacgcccacaagcaggaatccggtatcgctcctaactttgtgcactcacaggatggtagccaccttcgtatgacggtagtgcacgcttatgaggtctacgggattgactcctttgcactcattcacgactccttcggtaccattccggcagacgctggcaacctgttcaaggcggttcgtgagaccatggtgaagacttacgaggataacgatgtgattgcagacttctatgaccagttcgctgaccagctgcacgagtcccagctcgataagatgccagaagttccggccaaaggggacctgaatctgcgcgatatcttagagtctgacttcgcgttcgcctaaggtctccagcaattaggtagcactatagggaaccttcgaacgaccgagggttccgttacttaaagtcttaacttaaagaatacttaaagaggcacgctatgacttactcaatcgttgtaaccatcttgttaatcatcatcacagcactcttcattatcaccatgcgtaatgcaatacgagatggggaacgcttggagcgtaaggtgcaggaggtaagctctcatcttaacaatgagtcagccaaggtgatacgactggcagacaggaccgagtctcttggtagagaggtgcactggttagagggcgaacttgagagcgagaaacagaaggtgcgcgacgtgaacgaactacgtagccgccaacgagaccgcatgaagtttctgcgcaagtcgctagatgacgcacaaaacgagctgctgatggtctccgacctgattcacattaaattcaccgcacgattacctgatggtcagccagtaaagacgctctttaagttgggacttggaccgtgtggtctacacgttaagtccctccgctggaccgagctggaagaccgctatctgatagaccagctgtgcaccaatggcgagcgtaagcagttcgtctactacaagggcgaagtagtaggacgcatcgagttccgccacggtaagtctgaataaggtagcactataggaacatactcaaggtcatcgtattccggtggccttcatgaatgtcccttacgagcacaatcaggagtaacaccatgtaccagaacacaatcaactttgagcgcaaccgtgaacgtcagcagaccgagggttatatccctaagggccgcaagctgaacaagacgaaacgcggtggtggcgtgaagggttccttccgtaacgagaagggtgacagcgttgttaaccaagagaaatacttcgtaggagcgtaacaaatggctgagcaaactaaatggctgttcgacgggagcacatcacagtggtcacgactaggctacacagagcgccgactttttgaagacactgggttgacggtcattatgactcaagactggagcacacaaggtgttacactctcggtgcgcgagccgcgcctctatggtggtcaatgcctagtagagaagaccttcagtcgatggtcaattgactcagcgtcagactggctggcaaaactcatagccgactactcaagttggaaatgattaggtagcactataggcagactcaaggtcatcggattccggtgtcctttatgactgcttattgcatactaaatgaacactacacttcggagacatcatcatgatgaacattaagactaatccatataaggccgtttcatacgtacgctctgctatcgagaaggcgctggagacttccggttatctcatcgcagacactaaacacgatggtgttcgcgggaacatttgcgtagacaatacagccaacgcagcatggctcagccgggtctccaagaccatcccggcccttgagcacctcaacggtttcgaccagcgctggcagaagttactgaaagatgaccgctggattttcccggatggctttatgcttgatggcgaactcatggtcaaaggcgtggacttcaacacggggtctggccttctacgtaccaagtggctcaagaagggtaacatgcagtttgacatcggtggtccatatgaacaatgggagactgacatgaagggtcagcccttcgcactccacccagagaaactcaaagttgtcctctacgatatcgttcctcttgacattatcgagtcaggcgacgactacaacgtgatgaccctcctgcgccttgagcacgtcaaggttgccttaccagtcctgcaagaccacttccctgaagtcgagtggtgcctctcagagtcccatgaagtttacgacatggatgaactcgatgcgctgtaccgacagaaacgagaagaaggtcacgaaggtctggtggttaaggaccctcgcggtatctacaagcgcggtaagaagtccggatggttcaagtgcaagccgaacgatgaagccgatggaatcattcagggagtcaattggggcactcccggtcttgcaaacgagggcaaagtcatcgggttctctgtgcttcttgagacaggtcgtttagtagacgccaacaacatctctcgcgcactgatggttgaatttactgccaacgttaaggaacacggcgaggaatactataatggctggtcttgccagattggctatatggaggagacgaaagatggttcattgcggcatccctcattcacctgcttcaggggaactgaggacaacccaagcgagaaaatataagtatagcaaagcggctccttcgggagtcgtttcagctactggtaagcccatcggctataagcgtaaagacgggtactggctgttatcatatggcggaaagcacctgctggcacacagagtggtctggatgcttaacttcggagtaatcccagaaggactagtgatagaccatattaatagagaccctagcgacaatcgcattgaaaacctgagagctgtaaccaccagcgtcaacaatgcaaatagcaaagtcaggtcccattgtgtaagcggtgagaaacatgtagcagttgataagagaactggcagattcaccgtcaggattcgtcgcaaatcgtatggaacctatggaaccattgcggaagccatatctgtacgagacgcggttattaattaggacccactataggagacaacaatatgtccatcaatctgattctaatcatcgtgttcatcctcgcggctatcgtgtggtcaatgaacgacgaaccaccatatagcggaggctaaaccatgcgcttacacttcaacaaatccaacggtatcttctcggttcgccgggaggaccgcagcactgtagcagccactgagcgccacggtaagattccacgtatcggcgacaccttcgagctggcacccagtgtgcacatcttggttactcgcggtctctacgaattggctcagacaaagagccgtcctttcgtacccgttgtggtaaccaagtggccacgccttcgcctgttctgggagcgcatcaaggaggtcgtaaatgactgaggtagcagtgtcaaccttctgtgaggcctgcgcgtttgatgatgaccgttatcctcacacctgtaagccaaaggtggcacagtcaggaactatctgcacagcctgtggcacccgtgacgagaaccacgtgaaatcctgcccgaaccgcctagacaaaaagtctgacgctgtgaaggctccgagtcattaccagctgttcgacggtactgagtctatcgaagtgattgcccgtgcgatgaccataagcgagttccgtgggttctgctttggtaacgtcctgaagtaccgcctgcgggcaggaaagaagtcggaccttgcgaacatggagcaggaccttaacaaggcagcattctatcaggagctgtttgataaacacaagggtctatgctatgacgccaagtgactggtgccgagcgatgtacgagaagacgctcgaccctgcgtacatcaccctgtataacatgtggaaggagcgagaagatgcaaaagttcgtcgtaacggtcgagacagctaacgcatcgtatgaactcccggtacacgctgggtctcttgaggaggccctcgaagttgccgaggcggagtacgaagagttaggccaagtgactcgggtacgcccagatagtcattaggtagcactatagggacacaggttgtccctcttactgtttaaacttaaaggagattcatcatggcattcgctaagaagaagatttataccaccaagattggtacctgtgagccgtatgcttacttcaacaagccggactatggcggtgagggttttgagaacccacgcggtacctacaaaggttccgtaacgttcaagaacgaagactgtcaggagctggtagacctcatcgttaagacccatgaggaaaactacgcggcacgtctggaagcgcatgaagcgaaccctcctaagtttcagaagggtaagaaacctctgaagccgtacgaaggcgacatgccgttcttcgacaatggtgatggcaccaccacgttcaacttcaagtgctacggttcgtacgaggacaagaagactggcgagaccaagaagattgttctgggtgtagtagacgctaaaggaaagcgcatccaagacgttccgatcatcggtggtggttccaaagtgaagattcgcttctcgctggtaccttacggctggtctgcggtagctggtgcttccgttaaattgcagctggaaggcgttatgctggtcgaactggctacctttggtggtggcgaagacgactgggctgacgaagccgtagaaggcggttacgaagctgacgaatctcgcagccgtaaacctcaggaagacccggaagactggtctggcgaggaagctgacgagggtgaagctgaagaagacgatgacttctaatggctggctatggggccaaagggattaggaaggtgggtgccttccggtctggccttgaggacaaggtgtccaagcagttagaatcaaagggcgtcacgttcgactacgaattgtggcgcatcccttacgttattcctgcgagtgaccacctttacactccagacttcttgctgcctaacggtatcttcgtggagactaagggtctctgggaagccgaggaccgcaagaagcacctattgattcgtgagcagtacccggagttagacatccggttagtattctcttcgagtcgcactaagatttacaaagggtcgcccaccagttacgctgagtggtgcgagaagcataacatcttgtttgccgacaaattgattcccgtagactggctgaaggagccgaagcgtgatgtaccgttcggcaagttcaagcagaagaaaggagcaaagtaagtatggctaaggttcaattcactaagcgacaggagacctctcagattttcgtgcactgttctgccactaaggcaaccatggacattggtgtccgtgagattcgccagtggcacaaagagcaggggtggctggacgttggctaccacttcatcatccgccgtgatggtaccgtagaggcgggccgtgaccaagatgctgtaggttcacacgtcaaggactacaactcgacttcggtcggtgtgtgtctggttggtggcatcgacgctaagggtaaccctgaagcaaacttcacgccagcccagatgcagtctctgcgctcactgctggtagaactgaaggtgcaatacgctggggcagtgttgatggctcaccacgatgtggcaccgaaggcttgtcctagcttcgacctgaagcgctggtgggagaagaacgaattggtcacttctgaccgtgggtaaacattaggtagcactacagggagacaatcgcgtttccctgttgtcgcttgaggagattactttatgaacaagttcaaagagcacttcgatccaatcccattcctagcatatggactgttagggctgtgggcgctatccttcgtggtctcgtttgtagcatcttgcattaatggtacatcgatatgagttacggagactctcaagaagatggtcaggagagtatcttcctgttccacgctccgtgcgaaaactgtggttcttctgatggtaactcagtgtactctgacgggcacgagtattgcttcgtgtgtcaacaccgggttcccggctcagaggaacgtaccgaaaagttatcatcaagaagacccaaaggagggaattacgggatgaatacacaaggttcaggactactggtattcggagagagtgacggtcggtacactgacctgacagctcgtggtatctcaaaggcgacatgccagaaggctggctattgggtcgccaaggtccgagggactgcctatcaggtggccgactatcgagaccagaatggctccatcgtctctcagaagctgcgggacaaggagaagaacttctctacccgagggtctcacaaaggggacgcactgttcggtaagcacctatggaacggtggcaagaagattgtcatcaccgagggtgaaatcgacatgttaaccgttatgcagcttcaggactgtaagtggcctgttgtttctctcggtcacggtgcgtcagccgctaagaaaacttgcagtgcaaactacgagtatttcgatagcttcgaccagattatcctgatgttcgatatggatgaccccggtcgtgcagctgtagaggaagccgctcaggttctacctcccggtaaggtccacgtggccgtgctaaccgagaaggacgccaacgagtgtttactcaagggcaaaggtaaggaggttctcgaccagatatggaacgctgcaccttgggtgcctgatggtgtcatcggcgctatgtccatgaaggaccgggtgcgagaggccatgaccagcgaacagagcgtgggataccttttctcgggatgtccgggactgaatgaccgaaccttgggtgcacgtggtggcgaagtcatcatggtcacttctgggtcaggaatgggtaagtctactttcgttcgtcagcaggccctagggttcgccagagagcagggactgaaggtaggcatggcgatgcttgaggagtccgtagaggagaccatggaggatgtcctagggattgccaacggcatccgcttacggcagcagcctagggagttcaagcagaagctgatagaggacgggacgtatgacaaatggttcgatgagctgtatggctccgaccagttccatctctacgactcctttgcggaagctgaggtggaccgcttgctggccaagttgcactacatgcgcacagggttaaactgtgacgtaatcattctggaccacatctcaatcgttgtgtcagcctcggaggaatccgatgagcgcaagatgattgaccgactcatgaccaagttgaaagggttcgctaagtcaaccggagtggtacttattgttatctgccacctgaagaacccggagaaaggtaaagctcatgaagaaggacgtgctgtttccattactgacctgcgtgggtctgggtctctgcgtcaactctctgatactatcattgcccttgagcgtaatcagcaaggggacatgcctaatcttgtcctccttcgtattctcaagtgtcgctttaatggtattggcgttggtattgcgggatacatggagtacaacgaaaggaccggactccttgaaccgtctagctacactggcggagaaggagagggtgatactggctgggaaggccacgaagaagacgactattgaaccagactggaagttaacaacacaatgtaattgcccatgggatagaccgtgcgtctgtcctgaccgggcttaatcaacctgaggagaaccatcatgtttaaacttatcgaagcattaggccgtctggtcatcgcgttgtacgtacgtgaagccaaggcactggacaaagcgtccaaggtggaagcagaagcagccgctaagctggctaaggccgccgacaaggcacgtcaggcatctcttgatgcaaccgcagaggcagcgaaagttgcacttaaagctcagaaacttaaggagttcttctaacccatggacatttacgtgctaatcggtatgcttattggcgtcctgctcatacatctatcaacataaggagttcttctaatgactaccaaagctaaattccccggcaacaccattcagctgtccgacactgtagaccagtggggcagcaaggttcacatcaacgtacgcaacgacaaggtaactctggtctaccgctggaaggcaaagagcgataaccgtgctcacactcagcgtgtgaccatagacgatactcaagcagctcgactgctggcatccgtagccgtagccgctactgtggccatcggtgaggacaaagtgcgtgaggccatcctgagtaaagaggtaggctcaacggcaacccgactggccgaagcgtcagaagctaagtgataaactcaaggtcattactatatgtagtggcctttatgattatcatacacaacatattgagaggacataaccatgcgtaaacctgaagaaatccgtgcagacatcgagaagctgaccaaagagctgtaagctgttaaggttcatgagtccagacaggttgctgctgttaacatcctgtataacttagggtggaaacatgacaaccttaatggatggcagaagcctgctccgaagcgtagcgactacaaggcaccactgaaggctggcgagctggcaacgtgggaggacggtcacatttatggaaccgtatatatccgcagagtcggtaacaaattctctcaggtgtcttacgtccgtggtgttagtcgtctgggtattgacgtccttacaggcagcttcgacattgagaacagtaagctgaccatccgtccacgtgagtatttcatcgggcgtagttaagcaacaggagaccactatgttagtatccgatatcgaggctaacaacctcttagagaaagtcactcagttccactgcggtgtcatttatgactacagcacggacgagtacgtatcgtatcgaccttgggacttctcagcgtatctcgatgcgctggaagctgaggtggctcgtggtggtctcatcgtattccacaacggtcacaagtacgatgccccagtgttaaccaagctggccaagctccaattaaaccgagagttccacctgccgcgtgagaacgtagtggacacgttggtgctcagtcgcctgctgttcgcgaacattaaggattccgacatggccctgctacgttccggtaagttacccggtaagcgcttcgggtctcacgctctggaggcgtggggttaccgcttaggcgagatgaagggtgagtacaaggatgacttcaagaagctccttgaggaacagggagaggactatgtggacggttctgagtggattagcttcaacgagccgatgatggattataacgttcaggacgttgtggtgaccaaggcgctcttagagaagttgctgagtgacaagcactacttcccggatgacgttaactttaccgattgctgtactgatgccttttggtatgattcctgcgaggccgtctggctggaacaccgagccgcttggttactcgctaagcaggagcgtaacggcttcccgttcaacaccaaggccatcgaggaactctacgtagaactcgctggtcgccgatctgaactccttcagacacttaccgacactttcggaacttggtatcagcctaagggtggcactgagttattcctgcacccgcgaaccgggaagcctctgggtaaatacccacgagtgaagtatcccaagcagggtggcatctacaagaaaccaaagaacaaagctcaacgtgagggtcgtgaaccctgcgagctggacactcgggattacgtagagggtgctccgtacacaccagtagagcacgttgtgtttaacccaagtagccgagaccacattgcactcaagctgaaggaagccggatggatacctacagagttcaccgataaaggtgcgcctaaggttgacgatgaggtccttgagcatgtgcgtgtggacgaccctgagaagcagcgctgtattgacctcatcaaagagtacctgatgatacagaagcgcataggtcaggcagctgagggtgacaaagcgtggctacgttacgttcaagaggatggtaaaatacatggttcagtcaatcctaatggtgccgttacaggccgagcgactcatagcttcccgaacctcggacaagtaccgggtgttcgaagtccttacggcgagccttgcagggctgcttttggtgctgagcatcatcttgatggcctcactggtttaccttgggtacaagctggcatcgacgccagtggtctggagctgcggtgtctcgcccacttcatgtccaagtacgacgggggagcttatgcagatgttattcttaacggggacatccacacagtaaaccagcaggctgctgagctgcctacacgcgataacgccaagacattcatctacggcttcctctatggtgctggtgatgaaaagattggacaaatcgttggagcaggtaaggaacgcgggaaggaactcaagaagaaattccttgagaacaccccagcaatcgcagcgttgcgcgaaggaatccagcagaccctcgtcgagtcatcccgatgggttgccggagagcagaaagtcaagtggaaacgtcgttggattaagggactcgatggacgtaaggtacacgtacggtcaccacatgctgcactcaacaccctccttcagtcagcgggcgcgctcatttgtaagctctggattgtcgagactgaagagttacttctcaaagctggattaaagcacggttgggatggtgattttgcgtacatggcgtgggttcacgatgaaatacaagtggcctgccgtaccccagagattgcacagcgggtgattgacattgcacaacaagcgatgcgtaacgttggggaacactttaagttccgatgccgtctggatacagaaggtaagatgggtccgaactgggccgtatgtcactaatactatacaggagatttatcatggctatgactaaacgtgtgcgcgtaacatttgactctaagtttgtagcaggtacgaatgatatcaacgagttcgctaagacacttgtgagctactctaagcgcttcatggagggtgataataccctaaaaggcgaccagctggctcttgcagagatggcggcgaaggaaggcgtagaggctgctgtggaactgtctatcaaaatgtcctactcaaaagctatcaagagtgaactagctgacgactgcgtgacagtctccaacattcgaatggagattaaacagtgagcgagtacctaaaagttctggcggccctcaagggctgcccaaagtccttccagtcgaactacgtgcgtaacaacgctgcgttagtcgctgaggctgcgagccgtggtcacatttcgtgtctgaccatgagtggccgtaacggtggcgcttgggaaattaccagtgccggagtgaaattccttaagactcatggaggttgcttatgaaagacttcttaggaaatactatagagattggggacaccattgtctacgcagacactggaggtcggggtggctcatctactctgtacaaaaccgttgtcactaagatgactgagaagcaggtgttggtcgccgaatcttcgtggtcaaaactgtggcgtccgttcaaccgggtcgtggttgttgccaaaggaggttgcctgtgagaaagagaatggtgttcgtgcacccgttggaacctaaatcacactgggaaactgctgatggcatcgtctggttttataaggaaggccacatgctgcgacagtcccatgtcacccacaaggaccttcacgacccggagatgggctttaagttcaaggagttaaagaatgagtaagcacacattgttatccttcagtgactaccgggcaacccagaagattgccaagggtgttcttgtgatggatggtgactggctggtattccaagccatgagtgccgctgagttcgatgcctcgtgggaggaggagatttggcaccgttgctgtgaccacgctaaggctcgcgagattctggagaactccattgaatcctacaaagggcgcaagaaggcgtggaagaatgcagacgttgtcctagcgttcactgaccgtgtcaactggcgtaagctgctggtggacccaacgtacaaagagaaccgagctgtcactaagaagcctgttggttacttcgagttccttgaatccgtctttgaaacctacacgtgcgtccttgagcctcagctcgaaggcgatgacgtgatgggtatcatcgggtctaaccctctcgtgtataactacgagaaggccgttctggtctcctgtgacaaggactttaagaccatcccggattgtgatttcctgtggtgcacgactggtaacatcctcgttcagactcaggagaccgctgactactggcacctcttccagactatcaagggtgacatcaccgatggttacggtgggattcccggatggggtgataccgctgaggacttcctcaaggaaccattcattgtggagcctgtaacgtccgtactgaagtcaggtaagaacaagggccaagaggtaaccaagtgggtgaaacgcgctcctgagccgggagagacgctctgggactgcattaagtccattggtgccaaagcagggatgaccgaagcggaagtaatcaagcagggccagatggctcgcatcctccgttctgatgagtacaacatcgagactggggagattactctatggcaaccgggcagttaattctcatcgtcctgaccatgggcttaatagctcgtggtatctggatgttggccttagttatcaagcagatagctgaccacaagcgcaagtgataaactcatgggcactaattaggtagcactatagggaagtgcccattatgattattacttaaagattacttaaagaggagactcaaatgttaaaacctatagagcacatccttaacaatcctaatgaccttcctgacgtaccgcgagctgtcaaggagtacctacagtctcgcttcaatgctgacttcctgtatcaatcagaggtccgtaagctgcgtgaggcgggtcacagtgaggagttcatctccggggtactatatggtcaccacatggcttcgcgtgtccttgatgagatggagggccgtcagcgtgcactcaaagaaggagattgattatgtgtttctcacctaagatgaaagcacctaaggttgacacaacgactgtccctgagccagcgccactcactgaggaaccaaagggtatccagtatggtggtgacgaggattcaaacagcaccactcctgaggtgtcagggcgtaagtcactcaaggtgaccaagacgaccgagcctacagggtccgtcagtaaaatccgtaagtcggctttaggaggctaacatgggactgttcaagaaaatcaagaaggctatctccaaggtagtcaaggcaccactcaaggccgtgggtctggcagcagatgcacccaacgtgcagacagccgctgagacacctgtggccgcacctcaggaagcaccgaaagaggtcgtggaggacgttgagtcttcggcagacactgagtctggtaagaagaaaactcgcgcctccggtaagaagtccctctcagtttcccgcagctcaggcggtgggattaacttatgattggttacggggagggctaacaaatggcagaagttaaactcgaaggcttcgcagaggagggagccaaggcggtatacgaccgtctgaagaacgaccgacaaccttatgagacacgagcagagtcctgcgctcagtacacgattccatcactgttccctaaggactccgataacgcctcaaccgattatacgactccgtggcaatccgtaggtgcacgtggcctgaacaacctagcgtccaagctgatgctggccctgttcccgatgcagtcatggatgaagttgaccattagtgaatacgaagcgaagaaccttctgggtgacgctgagggtctcgctaaggtcgatgagggcctctcaatggtagagcgcatcatcatgaactacatcgagtccaacagttaccgagtgactctctttgagtgcttgaagcaactgtgtgtggccgggaacgcgctgctgtacttaccggagcctgagggttatacccctatgaagctctatcgactgaactcgtatgtggtacagcgagacgctttcggtaacgtactccagattgtcaccctagacaagattgcgtttaacgctctccctgaggatgtccgcagccaagtggaagcagcccaaggtgagcagaaggaagacgctgagattgacatctacacccacgtatatctgaacgaagccggggatggttactcgaagtacgaagaggttgccgaagaggtagtaccgggcagcgaagctgagtaccctctcgaagagtgtccatacattccggtccgtatggtacgcatcgacggtgaatcctacggacgttcctacgtggaagagtatctgggagacctcaagtccctagagaacctccaagagtctatcgtgaagatggcaatgattaccgccaaggttatcggtctggtagacccagcaggtatcactcaggtccgcagactcacggcagcacagtctggtgcgttcgtaccgggccgtaagcaggacattgagttcctccaattggagaagtccggtgactttaccgtagcgaagaacgtaagcgacaccattgaggctcgcctctcgtatgcctttatgctcaacagtgcggtacaacgtacaggcgagcgagtcacagccgaagagattcggtacgtggcgtcagagctggaagatacccttggcggtgtctactcgattctctcgcaggaactccagctgcctctggtaagagtgctcttgaagcaactacaagccacgcagcaaatcccggagttacctaaagaggccgtcgagccaactatcagcactggccttgaggctatcggacgcggtcaggaccttgacaagctggagcggtgcattaacgcatggtctgcccttaaggctctcgaaggtgatgatgacctcaacttggctaacctcaagttgcgaattgctaatgctatcggactcgacacagctggtatgctgctcactcaggaagagaagaacgcccttatggcacagcaaggtgctcagattgctacacagcaaggggccgctgcgctgggtcaagggatggccgctcaggctactgcaagtcctgaggcgatggcagctgctgctgattccgtaggtatgcagccgggtatgtaattaggtagcactatagggagacacatccagagtgagtgagttctggtctgaaggttcgagtccttcgtgttttccctcttagtcttaaatttaaggagattgaaatggctggcgaatctaacgcagacgtatacgcatccttcggtgtcaacagtgctgtgctgactggtagtacacctgaggagcaccaagaaaacatgttggctcttgatgttgctgcccgtgatggtgatgatgcaatcgagctgaacaccaacagtgatgacccgtatggctccgatgtggacccgttcggtgaacctgaagagggccgtatgcaggtccgcatctccgctgacggttccgacgaagagtctaccgaaggtgaagagggttctgaagaagaacagcagggcgacgaggggagtcagccggaggaagtaaccgacgatggcgaacaagaagagttcaaaccgattggtgaaactccggctgacataaacgaagcctctcagcagctggaagaacacgaagctggctttaacgacatggttgccactgcaatcgaacgcggtctctcacaggatgctgtgacacgtattcagcaggaataccagaacgaagacagtttgtccgatgagtcctaccgagagttggccgaggctggctacagtaaggcgttcgtcgatgcgtacattcgtggtcaggaagctctggtcaaccagtacgtcgagaaagtgatggacttcgttggtggccgcgagcgcttccagcaggtctacggtcacatgaagaccaacaaccctgagggtgctgaggcactcatcaaggcttttgaatcccgtgacgtagccaccatgaagacgattctgaacctagcgggacagtctcgtgataaaacctttggtaagaaagctgagcgcactattaccaagcgtgcaaccccagcgaaacctgcggcccgtaaggctgaaggcttcgagtctcaagctgagatgattaaagctatgtctgacccgcgttaccgcaccgactccaagtatcgtcgtgaagtggaacagaaggttatcgactctaagttttaattaggtagcactatagggagaccccagcgccgatgaaaggctgggacttctcccttcgagttacacaatgagtatcacctcgtttcaagtagtacctcaaaacatttcgtataaacaacataaggagattcaacatggctaacatgcaaggtggacagcagctcggtactaaccaaggtaaaggtcaatccgcagcagacaagctggcgctattcctgaaagtattcggcggtgaagtcctgaccgcattcgctcgtacctctgtgaccaccaaccgtcacatgcagcgtcaaatcagctccggtaagtccgcacagttccctgtgattggtcgcaccaaggctgcttacctgcaaccgggcgagtctctggatgacaaacgcaaagacatcaagcacaccgagaagaccattaacattgatggcctgctgactgcggacgtgctgatttacgacatcgaagacgcgatgaaccactatgacgtgcgctccgagtacacctctcagattggtgaatctctggcgatggcagctgatggtgcagttctggctgagctggctggtctggttaacctcgctgattccgtcaacgagaacatcgctggtctgggcaaaccgtccctgctggaagttggtgctaaggctgacctgaccgacccggttaaactgggccaagcggttatcgcgcagctgaccattgctcgtgcggctctgaccaagaactacgtcccggctaacgaccgtacgttctacaccaccccggacgtgtactctgcgattctggctgctcttatgcctaacgctgcgaactatgcggctctgatcgaccctgagcgtggttctatccgtaacgtgatgggcttcgaagtcgtcgaggttccgcacctgaccgctggtggtgctggtgatgaccgcccagacgaaggcgcagatgcgaccaaccagaagcacgccttcccggcaactggcggtaaagtcaacaaagagaacgttgtaggcctgttccagcaccgttccgctgttggtactgtcaagttgaaagacctcgctctggaacgtgctcgccgcgctgagtatcaggctgaccagattatcgctaagtacgcgatgggtcacggtggtctgcgccctgagtctgcgggtgcgctggttttcacggcggcctaagcgtaaatacctttagtgctcgggtggtaactccacctgagtacgaggtacagactgtagccattgatggtgattcacttaaggtggcactcgatgggctggagagtgtaacggactggtcaacccttgaggtaacttatggtacttcagggattgtcagccatactcgccggaccaacacgctgtacttcaaaggaatcgctgtaggcgaaactctggtgactgtcagttttgaggggtctgaaaggaagacctttaagctggtcgtgactaactaataagccaaaccccttggggaccactcacggtctctgaggggttttttcgttaggagcttacattatgaacatgcaagatgcttactttgggtctgccgctgagctggatgctataaacgagatgctctcagctatcggtgaatccccggtgaccacccttgacgaagatggtagcgcagacgtagcgaacgctcgtcgtatcctcaacaggattaaccgccagattcagtctaaaggttgggcattcaatattaatgagtcagcaacattgaccccggatgccagcactggactcattccgttccgtccggcctacctgtcaatccttggtggccagtacgttaaccgtggaggttgggtgtacgataagtcaaccaacactgacaccttctcaggaccaattaccgtgaccctgattacccttcaggattacgacgagatgcccgaatgtttccgccagtggattgtcaccaaggccagccgccagttcaactctcggttcttcggagcggaggacgtagagaactctctggcacaggaagagatggaagcacggatggcgtgcaatgagtacgagatggacttcgggcagtacaacatgcttgacggtgacgcatacgttcagggcctcatcggtcgttaatcagaaacttaaggaggaccaaatggctctcgtatcacaatcaatcaagaacctcaagggaggcattagccagcagcctgaaatcctacggtacccagagcagggttcacttcaggtcaacggttggtcctccgagactgagggtctccagaagcgacctcccatggtgttcatcaagtccttgggaggtcgtggatatcttggggaagacccctacatccacctcataaaccgtgacgaatacgagcagtattacgccgtgtttacagggaatgacgttcgggtattcgacctgtccggctatgagtatcaggtccgaggggaccgctcgtatgtgatcgtcaataaccctaaggacaacttgcggatggtcactgtggccgactacacattcatcgtgaaccgtaccagacaggtccgtgagagtcagcacttgaccaacggtggtaccttcagagataacgtggacgcactcattaacgttcgcggtggccagtacggacgtaagctcgaagtgaacattaacggcgtctgggtaagccaccagctccctccgggtgacaacgctaaggatgacccacctaaggtagacgcacaggctatcgctgaggctctagctgctctactcagagcggcacatcctacgtggacgttcaatgtgggaacagggttcattcactgtattgctcccgcagataccaccattgacatcttggagacaaaggatggctacgcggaccagcttattaacccagtgacccattatgtccagagcttctctaagttacctctgaacgcaccagatgggtacatggtgaagattgtcggggacacatccaagaccgccgaccagtattacgttaagtatgacaagagtcagaaggtctggaaggaaactgttggatggaacatctcgatagggctggattacaccactatgccttggacactggttcgcgcagccgatggtaactttgacctcgggtatcatgaatggaaggaccgacgcgctggtgatgacgataccaaccctcaaccatcctttgtgaactcaacgataaccgacgtgttcttcttcaggaaccgattagggttcatctctggggagaacattgtgatgtcccgtaccagtaaatacttcgagttctacccgccgtcagtggccaactacacggacgatgacccgctggatgttgctgtgagtcataaccgagtgtcggtcctcaagtatgctgtgagcttcgctgaggagcttctgctgtggtctgatgaggcacagttcgtcctgtcagccaacggggtgttatccgctaagacagcacagctggacctgaccacccagttcgacgtgtcagaccgtgcgcgtccttacggtatcggtaggaacatctactatgcgtctcctcgcagctcctttacgtccatcatgcgctactacgcggtgcaggatgtaagctctgtgaagaacgcagaggacatgacggctcacgtaccgaactacatcccgaacggtgtctatagcatcaacgggtctggtacggagaacttcgcgtgtgtactgaccaaaggtgcccctagtaaggtgttcatctacaagttcctctacatggatgagaacatccggcagcagtcatggtcgcactgggacttcggtgatggtgtggaggtgatggccgcaaactgcatcaactcgacgatgtacatactgatgcggaatgcctacaacgtgtggatagctgcggtggactttaagaagaactctacggactttccgttcgagccttacaggttccacgtggacgccaagcggtcatatcacatctcagagactgcgtatgatattgagacgaaccagacggtagtgaacatcaaggacatctacggtgcgtcgttctctaatggtaccgtggcaatctgcgagagtgacggtaaaatcaccgagtacgagcctacgggttcctcttgggattcaaccccggacatccacattagcggtgacatctccggtaaggacattgtcatcgggttcctgtatgacttccagtatgtgttcagtcggttcctcatcaagcaggagcagaacgacggcacaacgtccactgaggactctggtcgcctacagctgcgcagagcgtgggtgaactatcaggacactggtgcgttcactgtgagtgtcgagaatggcaaccgtgagttcaactatctggtcaacgccaaagtaggctctacgggtctacgtctgggccagaaggccacgactactggtcagtatcgtttcccggttacaggtaacgcactgtatcagaaggtttccttgagttccttcaacgcttccccggtgtcaatcattgggtgcggctgggagggtaactacatgagacgcgctaacggtatttaactgaacgtctccctgtggtgccactcaattaggtagcactatagggagaccacactaagagggggacttaaagcatgtacataagaaacactgtaagtaatgacttcgagttattcatcccggcctaccatgacgtacttgaggcgcaggccatgggtatagaaccatcgttcccagcggttactgagtgtgtcacgttagaccacgatggttttcctttggctataggtggacactgtggagaccagtgctggttcgtcacgagcgaccaagtgtggagactcgacagggctggtaagctggagttccgtgagagaatcatggagtacagggacatgttattaaatgtttatccatccctgtggaacttcgtgtgggtcggcaacggtccccacaagcggttccttaagtccatcggtgctgtattccacgaggagtacactcagggtgggaagttccaactgttcaccataacgaggaggtaactatgtgctggatggcagctattcctattgcaatgacagcagtacaagccatcggtcagtcgcgcagtgaagccaagatgatcggtcttcagaatgaccagatgcgccgacagtccgcccagatgattaaagagtcaaacattcagaacgctaacgccagccttgagcaaaagcagaagctggaagaggctagtgcagacttgaccgctaagaatctcgacaaggttcaggccatgggtacaatccgtgcggctatcggagagggaaaccttgagggtgccagcatggaccgtatcagtcgcatcgaagagggcaagttcattcgggaggccaacgcggtcaccgataactaccgtcgagactatgcgtcactgttcgcccagcagctgggtaactccgagtcaactattgaccaagttaagtccatgcagaaggctgagggcaaaggtaagtccaaactggaacaggtgctggacccgctggccttaatgggttcgcagggtgcctcagcgtatgcttccggtgcgttcgatagcaagggcaccaaggcaccaataagtaaggcccaaggtactaaggtaggaggtaagtaatggccagtaaattagaacaagcattaagccaactcccacaggccgggtctacccgaatccgtggcggctcagcgtccatgcagtatcgcccggtgaccatccaacaggaaggtgccagacagtccaacctagttcagtccttggcgaagtttgggacagcagtaggagaagcagcggacgcatacgacaagcgccagcgagacaaggctgacgagcggtccgatgagattatccgtaagttgaccccagagcaacgtcgtgcggccatccagaatgggaccctgctgtatcaggatgacccgtacgctatggaggccctgcggttcaagactggccgtaacgctgcgttcctcatagacgacgaagtggcacagaaggttcagaacggtgagttccgcactcgtaccgagatggaagagtacagacacaagcggttgaccgaaggtgccaacgagtacgctgagcagttcatgattaaccctgaggactctgagttccagagagggttcaatgcgaacatcaccgagcgtaacatctcactgtatggtaagcacgatacattcctgagcgaacaggcacagaagggtgccatactggcctcgaaggtggagctgtcaggcgtgcttaaagaccctgccgttcttgcccgtccagagtccggtgagttcttccagcgctacatcgacaacgcgattaagaccgggagtatccctagcgacgctcaggcacaacaggtcatcatcgggtccctcaacgacgtcatccagcgtccgggtgcgaccaacttcttgcagagccttgagggccgtccggtcacccttaacgggaagaccacgacctacaaggaacttatgggagaggagcagtggaatgccctgatggtcaaggcccagtcaacccagttcgacaatgacgctaagttgtccgaaggtttccgccttgggatcaccagtgcgttgaaccaagacgacaccagcaagggctgggagatgcttcagggtgccaaggcagaactggatcgtctgcaacccggtgaacagatgacacccgagcgtgagcgcctgattcaagctgaggaacagatgcaggcccgtttccgtcaggaggcccaagcggtagccaaggagatggacaagcgtcaaaagaccattaacaagaatcaggtcatcgaccagcagttcaccaaacgcatcaacgggcagtatgtgtccaccagctacaaggacatgccgaccaacgagaacactggcgagttcactcacagtgacatggtgaattacgctaacgggaagctggctgagattgaccagatgcagctcacggagcaacagaaggaccgcatgaagctgagctacctacgggcagactcagagggtggagccttccgtaccgttgtaggccagatggtcaccgacgctgggtctgaatggtctgccgctgtgattaacggtaagttgccagaggacaccacggcgttgaacaagctgcgcaccatgcgtaacacctacccggacctcttcgctgcactgtacccggataaggctgacttgtttctgacgatggacatgatggacaagcagggtattgacccgcagattcttatcgacgctgaccgttcccgccgcagtctcaccaaggagatgcagtatgaggatgataaggcgtgggcgtccctgaagaacaactcagagtccccagaactgtcccgtatcccagcaagtctggatggtatggcccgtaagatttatgacagcttcaagtaccgcacaggtaacagtgatggtgccatgcagcaggtcgataagttcctcaaggaatccactgtgaccttcaaaggtgatgacatggacggtgataccattggtattatcccgaagaacatcctacaggtcagtgatgaccctaagagctgggagcaaggccgagacattctcgaagaagcccgtaagggaatcattgcggctaacccttgggtgacaaacaagcagctgacgatgtaccagcagggtgactctatctacatgatggacaccactgggactgttcgcatccgctatgataaggagctactgactcgaacctatcaggaacagcagcagcgactggccaaggaagccgaagagaaggcactgaaggaagcaaccaagcgtgcacctatctccgcagccactcaggcccgtaaggcagctggtgagcgcgtacgtgcgaaacgtaaagccactccgaagttcatttatggaggtggcgatgagtaaacaataaggagacaacatgagctacgacaagtccaaacctagtgactacgacggtatgttccagaaggcagcagacgcacacggtgttagttacgacctactgcgtaaactgtccttcaacgaatcatccttcaaccctaaggccgtctctaagactggccctaagggcatcatgcagttcaccaaagcgacggcccggagcatgggccttaacgtgaccgatggtgatgacgatgggcgctacaaccctgagttagccattgatgctggcgctaagctgcttgccagtctcgttaagaagtacgacggtgatgagctgaaagcggccctagcgtacaaccaaggggaaggcccagcgggtgcccctcagctccaagcgtacgacaagggagacttcaggtctatctcggaggaaggtcgtaactacatgcgcaagctgctggatgtggccaagagtccgaactcaggcgcactggaggcgttcggtggtatcaccccaaagggtaaagggattcccgcagaggatgccttcaagggcatagctaagactggtaaggtaggtactgagctgccggagtcccatgggttcgacgttgaaggtgtagcgcaggaagcgcccaacacgccatacgctaaggacttctgggagaagaccgggacgactctcgacgagtataacgctcggtcaaccttcttcgggttcggtgacgctgctgaggctcaacttcagaactcaaccttgggtgtggccttccgtgctgcgcgtgctgatgatgggtacgatgtgttcaaggacacgatgaccccgactcgctggaactcttacgtcccgtccaaggaggacttacagaagctgcgggactccgggttacctccgagttactacggcgtggtgactggtggtgacggtgagaactgggatgcgctcatcaagctggccaaggataactttgaggctgaccaacgggccgctgaggctggtactggggcgaaactcgctgctggtatcgttggtgctggtgtagacccgctcagctatgtccctctggtcggtgtggccgggaagggactcaaggtggtcaataaggccctgcgagtaggtgcacaggctggagcactcagtgttgcctctgagggaatccgtacgtcagtagctggtggtgaagctcactacgctgatgcagcacttggtgggttactgttcggtgctggtatgtcggctctcagtgatgctgtggcggctggtatccgtaaggctcgtggagtcgagtctgtgaatgagttcgctggtccggcactccgtatggaagcacgagagacagccatcaacactggtggtcacgatacctctacactacctccagataacttctcgttcgagcagggccacggaggcgttccatttgctgaccacccaaccgaagagggcgcagtggttcttgccaatggttccatcttgagcgacaccaacccgcttaacccaaggacccagcgtgacttcgcagagattgacccagagcgtgcagctcccggtatcaaactcggtggattcactgagattggcctgaagaccttagggtccaaggacgctggtgttcgtgcaatcgctcaggacctagtgcgctcacctacagggatgcaatcagggtctagtggtaagttcggtgcgaccgcttcggacatccatgagcggctccatgcgactgaccagcggatgtataaccagctgtatgacgctgttgaccgtgccatgaaggacccagagttctccattggtgagcagaagatgtcacgcagagccatccgtcaggaagtctacaagcgtgctgccttggcgattgagcgtccagagttacaggctgatttgaccaaaggtgaacgtgaggtgatggacctactgaaagagcacttcgataccaagcgtgagctgatggaacagccgggtattttcggtaacgctaacgccgtgagcatcttccccggtagtcgccataagggaacctacatacctaacgtgtacgataggggtgctaaggagctgatgactcagaaactaggcggacctgaaggactccaacaggcaatcgctcagagctggcttaccagttaccgagtgcgacctgaggttaaggcccgtgtggatgagtacctcatggaactcaacggttacaagtcggttgaccaagtgacacctgaggtggtccagaagcacgctatggataaggcgtacggtatcagccacactgaggacttcacggcatcaagtgtcattgacgacaacatcactggtctggtcggtattgagaacaactcgttccttgaagcccgtaacatgttcgacagcgacatcccggttaccttaccggacgggtcaaccttcagtgtcaacgacctgagggacttcgacatggcacggattatccccgcatacgaccgccgagttaacggtgatatctccatcatgggtggtagtgggaagaccactaagcagctcaaggacgaaatcatggcgttagacaagcgggccgagcgtaagggacaactgaagggtgaagtggaagccctgaaggacaccgtcaagattctcactggtcgtgctcgccgtaacaacgatacagcctttgagacggctatgcgctccctgaatgacctagcgttcttcgctaagaacttctacatgggtccgcagaacctcacagagattgctgggatgttggctaagggtaacgttaaggcgatgctacatggtatcccaacgttgcgtgacctcgccaccagaacctctccggtgtccggtagcgaactccgtgaactccatggggcgctgttcggtaaggaactcgaccagttaatccgtccggggcgtgaggacatcgtgcagcgaatccgtgaggcttccgataccagtggggccatggcgtcagtaattggtaccattaagttcggtactcaggagctgtcggctcgttctccttggaccaagatgctgaacggtacggccaactacattctggacactgcccgtcagggtgtgctcggtgatgtggctggtgcggccctaggcggtaagggttccaagtttggcaaagagaacttcctcaaagctgcctctatcagtccagagcagtggaagggcatcaagcaactctttgttgaccatgcgactcgtgatgccgacggccagttcactatcaaggacaagaaggcgttcagtcaagacccgagagcgatggacctgtggcgtcttgccgataaggttgctgatgagaccatgctgagacctcacaaggtatcccagcaggattccaaggcgtatggtgctggtgtcaagatggctatgcagttcaagaacttcaccatcaagtcactcaacgctaagttcattcggtccttctacgagggctacaagaacaaccgtgccatcgacatggccctgacccacgtgttgtctatgggtatcgctgggacttactttgcgatgcaggcccatgtgaaggcttacggactccaagaggctcaacgtaaggactacctgaagaaagctcttaacccgactatgctgggctacgcagcgttgactcgaagttcccacactggtgccccgctgtctatcgtttcgatgatggctggtgccgctggattccaagacgccaacatgctgcgctccaccatcttacctaaggaggaacagttccagaagaaagatggagcgtccaaaggtcgagccgagtcgagcaaccttgcgggtaacttggggtctcaggtcccagcgctgggttacgtagggaacgtcattgcgaccgctaagaacgcttatggtgttgctacagcgcctaacaagccgactgagcgtgactacatgactggcctgatgaactccaccaaggagcttgtacctaacgacccgctcacccagcagctcataatgaaaatctatgaggcaaacggtgtgaccatcaagcaacagcctaaacctaactaattaggtagcactatagggagaccgcttggtttcccttctcattcactttaaggaggtcataatggaccaagacattaaaacagtcattcagtacccagtgggagagactgagtacgacatcccgttcgactacctatcccgtcgcttcgtcagagtgtctctggtctctgaggattcccgaagactgcttagtaacatcacggagtaccgctacgtctccaagaccagaatcaaactactggtttctactgaaggtttcgaccgtgttgagattcgtcggtttacctcagcctctgagcgaattgttgacttcaatgatggctctgtgctgcgagcaacagaccttaacgtatcacagctacagtcggcgcatattgcggaagaagcccgtgatgcagccctgctggccatgcctcaggacgacgcaggtaacctcgatgcacgcagtcgccgtatcgttaacttagctcccggtattgatggcactgacgctatcaataaggaccagttagattcaacgctgggtgaggctggtggtatcctttctgatatgaaagaagtacataaggaaacctatgactacatcgagaagctcggtgatgacacttcaattgtccgtggggtaacttgggtgcacaaccaagggtctgccgttggtggtgagactactgtactcatcgataaacctacccgcacgcttgccgttccttatatcgagattaatggtagtcgccaagaggttgggtatcacttctcgtttgacattgccacccagatgattaccttaacggaaccactggttaccggggacttcctgatggcaatgaccacagagtctagtgtacctctggaagaccttctggctaacccgactggtgcctcggctatcggtacctccgatggtcgaaacgttcaggcaaacatcgacgagcttcgctcagagttagacttcctgaaagacactacggtgctcgacgttcgccgttttggtgctgtgggtgatggtattgcagatgattacccggcgtttcagaaagcgtgtatcgctgcgagccaacttggcggggcaatagtccacgtaccgaccccaaaggtaaaatggaagattggattcccggtatacttgttcgaccgaacttgggtccggggtacaggcattaactgtattgtagagttcactgacccgctgtatgcacgcaagtcccgctctgggttcgtcattgggtctggttatgaacagaaccgagacaaggccattcagtgtcttaacgatggcacttgggccactactggctcggtggtaaataaggacttcgttgaattgggccgagggcagtacgtacgcgacaaccctagcaaggtccagtcaagactgtgccgagtgtccgggatgtacctgaaagcttcgtatccgaacggtgctaccctgaagggcggctacgctgtgtctggtgccaacgcggtagactcagaggtatttgacatttggggtgaaggttggactgagattatcaacttcgggtctgacgtaccgccagctacgccaagttgtcacaacctccatgcgtacgacatcacgtgtgttgctcctaacgactacgagacgtactacagcgcagggttcattgcgaactctacaaactgctctattggccgattcaagcagctcagggcaatagctgatggttctcctcacggttcctgtggttccatgaactacaccgagtattgctccttctacgatatcgacgtaccgagcttaggtcgtacagcctcgtctgagggtatccttgtgaacaactccaagggcgctgtgactcgtaacgttcgtattggtaacgctaagaccggggtggccgagtattacaccactggtgctggtatcttctacgacagagaccaacccaacgtgttcgatagtatccatgcgaataactgtgacaacgcggtagctctccgctccaagttctcggtttggaagaacgtgacgcagaccaactgtacctaccacgtctacttcgggaccaccaacgctcaagcctgtgtggttaagttcgtaccggacacaattggtggtggcaataacgtagacattctggacaggctccgcgataacgttgtgactggctggcgtgtgcgctcgctccacatccgccctatcgcctacctactgaacgacaagtcagtattgcgtagctgggatgctggtaagaacatcaaggctgagaacggtgtgggattccagtggttattcactgtaccacctaccatgcgtgcaatcactcaggtcagccaatggtttaccttcgaggttggtgcagcgacggccgggacagaggtcaaggttcaggttcgcagtatgtcagcgtacaacggagacgccaacgagcagcctgtaatcctctttgagaacagccgcaaggcctctctggataccgtacaggcaaccaacgttgtagcgaactcctcaggtctggtcctgacgtcccctacggatggactggctaacgctgtggatgtcctagtgagcgttacagcaccgaccgttaacttcaacatgaaagaagctcgcatcacgtatctgggcgactaactaaggagacagtatgttaaacaaattgaatcaacctaaaggctctacaatcggtgtgctcaaggatgggcgcaccatccaagaggcaatcgacgagctggataagattaagacccgcaacgttgaccctgagcgcttccgtgagacgttgacgtcaagtgacgatgaggtattcgagaagctgttcgcgtggttggccactcagtcagacgttgtgggaacctcaagttcttcctatatcacagccttacctcgcatgattgagcttagcggtcgtacctatacgttgactaagcgtcacgtgctggacggtaactttggtatacagaacggtaccatcctgatgtccggtgagggtgagattatcatgggcctcgatgctggtaccaagactcgtcgtcacttccttaagtatgtacatttcgagtacatcggggcatccgaccgtagcacctctctggtcaccatggcacgatgcttcaactctgtggtgctattctgtaacttcattgctggtggtgataccgctcgcaacagagcaccacgtacccgttatggcctgttcgcagggtccacccgatgctggggcttccagttaatcggtggtgagtactacggtggcgactgtgcgttacgtgttggacgagctaacgaccacactgggttgaccattcgtcccggtactgttcaccattcgcgtgtaatcaacatgatgttgtgtaacccagcaggtgccgaggtgtctggctgtaacattgaacacgcagacaatggggccataggcctagggattacctcgggtaccaatacctccggtaacgcagcccatggagttcgcatcaacggtgtatacttctacaacaacggtaacggctccagcggctcaaacgtatcaccggcgaatatcctcattggtaaggacattccgggtacagaaggttgggaccgaccgggcgagctgattacgtcaagtagaaacactgcgcacagcattacggtgtcagagtgctacatcgttagcccaaacacccagaacgcttggcaggttaacgccctgtacggtgtatccttcttggacaacaaagtgggcctcaaaggtgacgctacgattcacggtgtgtatgacggtacatgtgctaactgctgggctgtaggcaaccgagaccaaggcggcaaggtgttccagttctcctctacggcaaccaacgtgattctgactaccagaaagggtaagtggactccgaagattatcggtgagggcacagcaggtaacacgacgctgagtgcttctggtggtgcgtactctctggataacggaatggtcaccgtgtcgtgcttcgcagtggttgacactaaggacccaaacatggctggcaacctgaacatcaaactcccggtagcctgtgaggaccagcagcggggcggtacaggcatctcgttgacgaacgttccagacgtaccgagcccgaatggtagcataattgtgataggagacaccgctcgaatcatgctggggtctgcgagactacagccagcaaacgtcacgaccggtaccgccatccacttctcagtatcctacccagcagacgttaaggtataaggaggtaacatgttgtccctagacttcaataacgaagttatcaaggcggctcccattgcgggggtcgctggggctgacggtgtagcgaggctcttctggggcctctcactcaacgagtggttctacgtcgcggcaatcgcctacacagtggttcagattggtgccaaggtagtcgataaaataattgactggaagaaagctaataaggagtaacacatggacctgattaagttcctcgaaatgttagacactgagatggctcagcagatgctcatggacctgaagaatccagagaagcggacccctcagttgtacaacgccattggtaaactacttgagcgacataagttccaaatctctaagctgacccctgacgttaacatcttgggcggactggctgagggtcttgaggcttacaactccaaggtgggcgctgatggtctgacagacgacgatacgttcaccctacagtgatatactcaaggtactactatatgtagtgcctttatggatgtcattgcgctacgctaggcgttcctacgtgaaatctgagaaacaacgggaggcattatgctggagttcacaaagagaatcgtcccgtatcttgtggctatcatggtgtttgccttcgggtggcacttgggttcgcaatctacggacgctaaatggaaggaggtagtacagaatgagtacgtttcgaagcaaacagctagagttcaaactcaagcagcacttgacgagatatcggctaagtaccaagcagaccttgaggggctggagggcagcactgataggattattgctgatttgcgtagcgacaataagcggctgcgcgtcaaagtcaaacctaccagtgtccccgcaggaccagacggtcgatgcctcgttgatggttccatcgaactacacgaagcaactgctcgaagtcttatcgcaataacccagaaggctgacctcaaagagaaggccctacaggacacaattcgtaagcttcaagggaaaggaggtgaacattgagtaactctcagcaagccaagaacgccttaatcattgcgcaactgaagggtgactttgtcgcctttctcttcgtgctctggaaggccctgaacctgccggaaccaaccaagtgtcaaatcgacatggccaagtgtctggcagacccaaagaacaagaagtttatccttcaggctttccgtggtatcgggaagtcgttcatcacgtgtgcgttcgtagtgtggaccctgtggcgtgaccctcagttaaagatactgattgtctcggcctcaaaggaacgtgcggacgctaactccatcttcatcaagaacatcatcgacttgttgcctttcctgagtgagcttaagcctcgccccggtcagcgtgactccgtgattagcttcgatgtaggccctgccaagccggaccacagcccgtcagttaagtctgtgggtataacgggtcagcttactggtagccgtgccgacatcatcattgcggatgacgtggagattcccggtaactctgcaacccaaggtgctcgtgagaaactctggacgttggttcaggagttcgccgcactgttgaaacctctaccgactagccgtgttatctatctgggtacccctcagaccgagatgacgctctacaaggaacttgaggacaaccgtgggtactccaccattatctggcctgcacagtatccccgctccaaagaggaagacctgtactacggcgaccgtctggctccgatgctccgcagtgagtacgatgaggacaaagagggcctcagtagtcaacctaccgacccggttcgattcgactccatggaccttcaggagcgtgaggtggaatacggcaaggctggatatacgcttcagttcatgctcaaccctaacctcagtgacgccgagaagtaccctctacgactccgtgacgctatcgtatgcggtctacagatggacaaggccccaatgcactaccagtggcttccgaaccgtcagaaccgcaatgaggagcttcctaacgtgggcatgaagggtgacgagatttactccttccatacagcctccagcaacactggtgcgtatcagggtaagattctggtcattgaccccagtggtcgcggtaaggatgagactggctggtgcgtactgtacaccctcaacggttacatctacctgatggacgctggcggtactcgtggttacgaagagaagtcccttgagttcctcgccaagaaagccaaacagtggcaggtgcagacagtggtcttcgagagtaacttcggtgacggtatgttcggtaatgtgttccagcctgtgctcctgaagcatcacccagcgcaactcgaagagattcgtgctcgtggtatgaaagaggcccgcatctgcgatacacttgagcctgtactagcaagccaccgcttggtaatccgtgacgaggtcatccgacaggactaccagacagcacgtgatgcagacggtaagcacgctctgaagtacagcctgttctaccagatgacccgtatgagccgtgagaagggagctgtggcacatgacgaccgacttgatgcgttagcattgggtgtcgagttcctacgctctacgatgcagcaggacgctgtgaagatagaggctgaggtacttcaggagttcttggagcaccacatggagaagcccctgagtaacatctcccagttccgggccaccagtagcaacggtgtggacatccgatgggaagacgacggggatagctctatgttcatcgaatggtaactatgcagtgattgtgcataaggattcattaggccacggaaggccacttttggaaaactctaagcataacagacacttggaattaggtagcactatagggagagacccaaggttacatactataagactacttaaagtttcattcatatagatatgcactttaagtctccttaaaggcagagggtagtgatgataatatcaccctctaactataagacactaagagccaacacaaggaggacctatgcgcttactgttaaccttactgcgccataggactacttggcgatttctgctggtacttgctggtgcccttggggcttcactggttactcaacaacaactcggtggattggagactctcgtgtgctctctactcacttgtagcgattagggtcttcctgacgcgctagggattccgtagtgatgcttatcagcatacaccactccatccctctatagtcaatacttaaagttaaccttaggtgactcattgggtctacctacgggtctatgcaatgacctgaggactacctgaggttacctttaagaattttacacaaagttctgagtgcacatctcacagtttacacttttggttatcccccccatctcacagtttacacttttggttatccccccccggtaccctctcagtccacccaaagtaaccctaggccaccctaaaccttcggtttaaccttaggtgggactgatgggaaaccttgggtgatactatatgttgtggtgagtgggaccttgggatactatatgttgatgtctctgtgtccc

SEQ ID NO: 8 - DNA, 41030 bp, Unknown
  source: /note="Description of Unknown: KP3W-P0108 Bacteriophage sequence"
tatctgttggccctttaagtaaccacctgaggttagacctgaggttagacctgaggttagacctgagaccatattaccttaggttcaccgtttgtctaacgtttagcagtccctgagacactgagagcgggacaaagggtatcggtgagtcattactataaggctattcaatggtcagtgtcactacattactcaattaggtatcactatagggagacactttaagtattactaagagaccatcaccataaagataactatcactataggtctacataaagtttaacttaaggtgttgacattcagaatccgttatgagacattagcaaccgttgagagacacaacgtcaccagcaaccagacaataccacgagttatctggttagactgagggtctcaagtagtcatcaaccggacatacgaaagtggttgactcaacgatgaacaagtagtacgatgtatcacagattcacagacatgaagtaccgctacctagtagcatcgctctttaacaatctggattaatcgctgacatgtacatcactcatcacttagtgtttaactagtggtcacattcaggtctctggcaaggtacgtcctgtcatcctgagagtggccacgctgataaccactaacatcgaggatatacaccatggaaatcgtaatgcaggcactgcaagattacacagattgcgtcacccactcgcaagagtgtggcgactagcggttaacgacaggtcatccgagaggtggcctgaaagataaccactaaccataggatatacaccatgattcacacgaaagaaccagccaacaaagtattcgtattcgttaccgcttaccgtggctatgagtcgctcgaagttaacgagaagatgctcaagggtctcattaagaccattcgcacctatccgggagcatacggcaacattcgtgatgagcacgtacaaggctgctttaaggaggctggtatgcccgaggcaacgcaagagcgcacgcttaaggtggaatgtaccatcaaacaagcggctgagctgtcatggttagcatgtaagacctatcatcaagacgctgtactggtggttaactcacagactcacacggcctctctgtggtctatcgaggacgtaggcgaatatcctcaggtatacccacgcttgaaagaggtgtctttaggtggcacgctgcaacaggttgatgcacctaagggtgaatgctattcagtcatcaacgggcagtactgggaggtggtgtaatgagtaagctgctagcgatatccaaaataacagggcaatgcactgtaacattacgggagtacccacacggtgcaatggggagtacctacattgtgcgatatggtaagaaggtaaaacactgggtcaacgaagtactagctcaggaggattatcaatcatgcgtcgtacatcaatcaacttgcgctgggtggaatgactaatgatcacctactacgtgtacgtcaaccaaatggaatacttcgaagtagatactctggaggaggcgataagactgtgcgactctgtaccgggctcacatgttgaggatagcgtgttagatgaggtgatttatgcaaatagatagtgaggttacagtacacggaatcaccaaagagaagctggagttctaccgcttccgcatggtggcgtgcggtcgctcccacgattacctaatggcccaactggccaaaacctatagaactcgcaaggtgatgtatgctaatcgaatgcaacaatcttgataactttctggataccgtggcgggcctcgttaagcgcggcctcatgttcacctcgaacgcctcagcactgaccataacgttaaccggaggctactgagtgctaaccctatttgtgctcttcgtgtactcgctgatagtcctgtacttccttagggactttcgcaagggtcttaaggtacacagggcaacactaagctactttaagtggggcttcgtgcctcgctttactgtacggctacctaatggccgctttaaggcaaacaaggtaggtattttctacatcgcaacccattgatatcacacttaaggaaacacacaatgaactacaccgacatgcaagaacgcttagacgtcatccgtaacctgtcaatctgtgaactcgacaagcgccaaccgctattggttgcactcatcgcggaccttgtgaactgtgagacgtccgacggtgacgatacggccagcgattggggtctggaacgtcaggactattggcaaaccttgaagattaaggccaaagacgctgggtttaacctgctgggcaatggtcacttcagcgcagcgtttaagcacgagctgctaccgggtagggtcattaaggttggctttaagaaagaggactcaggggccgcctacgtggctttctgccggatgcaccaaggtcgggtagggattcctaacgtctatcacgtagcgcgccacgctggctgctatacggtggtactggatgagctggaaccatgccagcgccgagcgaacgatgagcacgaccactacgcagacctcgcttatttctttgtcgagggcgactcggacccagaggagcacgcagaggatgaccagccatttattgagacgtgccagatgattcgcaagttcttctacgggattgcgtcttttgatatgcacagcggaaacatcatgttcaccaaagacggcaagccagtaataaccgacccggtgtcattctcacaggaccgcgaacgtgagcctttctcgctggaacctgaggagctacttgcagagattgagcagatagcgcacgacaagatgattgaacgctgtaagcgcaacaaggctaaacgtgacccgaaagggggagctacgcatcgcacgccgtaaggctaataaggaacgtcgagcacgccgtaaggcacacgctaggaggctcaaggagcgtgaacgtgagcgcgagcagtatcacgtagacgccttaaaggcagacatagcgagtattgaagcgcgcgttccggtgtggtgcaggggaccgggcctagcgatacaaatgggcaagccgttgccaatcgacaattaccttcagggtagacttatgggttaactaggtgtatcttaggtgtctctcacgcaagaggcaccgatagataaactttattaatgccagttcgctggcaccaaagaggcacacaatgaacgcattaaacattgcacgtaatgacttctcagagattgaactggccgctatcccgtacaatatcctcagcgagcactacggggacaggctggcacgtgaacagctggcacttgagcatgaagcgtacgagctgggcgaacagcgtttcctgaagatgttagaacgtcaggtgaaagctggtgagttcgctgacaacgtggccgctaaaccgctggtcttaacgctgcacccgcagttaaccaagcgcattgacgactggaaggaggagcaagcaaacgctcgcggtaagaagcctcgcgcatattatccgattaagcacggtgtggcctcagagttagccattagcatgggcgctgaggtgctcaacgagaagcgcggagtgtctagtgaggcaatcgcactgttaaccattaaggtcgtcttagggacgctcacagacgcctctaaggcaaccatccagcaggtgtcctcacagttaggcaaggcccttgaggatgaggcccgcttcggtcgtatccgtgagcaggaagccgcatacttcaagaagaacgtggcggaccagctagacaagcgcgtaggccatgtgtacaagaaggctttcatgcaggttgtcgaggccgatatgatatccaaagggatgctgggcggtgacaactggtccagctggaagactgacgagcagatgcacgtagggaccaagctgctggagctactcattgaggggactggtctggtggaaatgaccaagaacaagatggccgatggctcagacgatgtgaccagtatgcagatggtccagctggctccggcctttgtggaactactgagtaaacgagctggcgcactcgcaggtattagcccgatgtaccaaccgtgtgtagtccctccgaagccttgggttgaaaccgtaggcggtggctactggtcagtaggtcgtcgcccgctggcactggtgcgtacccactccaagaaagcactgcgccgctatgaagacgtgcacatgcccgaggtatacaaagcggtcaacattgcgcaaaacacgccgtggaaggtgaacaagaaggtgctggcggtagtcaacgagattgtcaactggaagcattgcccggtgggtgacgtcccggcgattgagcgcgaagagttaccaccacgcccggatgatatcgacaccaacgaggtggcacgcaaggcatggtgcaaggaggccgcagcggtctaccgtaaggacaaggcccgccagtctcgccgtttgtcaatggagttcatggtcgcacaggccaacaaatttgctaaccacaaggccatctggttcccgtacaatatggactggcgcgggcgtgtgtacgctgtgagcatgtttaacccgcagggtaacgacatgaccaagggtatgctgacgctggccaaaggcaagccaatcggtctcgatgggttctactggctgaagattcacggtgcaaactgcgcgggcgtcgataaggttccattccctgagcgcatcaagttcatcgaagagaacgagagcaacattctggcgagcgcagccgacccgctgaataacacttggtggaccaagcaagattcgccgttctgcttcttagcgttctgctttgagtacgcaggcgttaaacaccatggcctgaattacaactgctcgctaccgctggcgttcgatgggtcatgctctgggattcagcacttcagcgcaatgctccgcgattccatcggtggtcgtgcggttaacctgctgccttccgataccgtgcaggatatctacaagattgttgccgacaaggttaacgaggtgctccagcagcacgttgtcaacgggtcccagacggtggtcgagcagattgccgacaaggagactggggagttccgcgagaaggtaacgctgggtgagtccgtactggctgcgcagtggttgcaatacggcgtgacccgcaaggtgactaagcgttcggtcatgacgttggcgtatggttccaaggagtttggcttccgccagcaagttcttgaggacaccattcagccagctattgacaacggcgagggcttgatgtttacacaccctaaccaagcggctggctacatggcgaagctgatttgggatgctgtgaccgtgaccgtagtggccgctgtcgaggcgatgaactggctgaagtctgccgctaaactgctggccgctgaagtcaaggacaagaagaccaaggaggtactccgcaagcgctgtgcaatccactgggtaacaccagacggcttcccggtgtggcaggaataccacaagcgcgaccaagcgcgcctgaagctgacgtttctgggtcaggccaacgtgttcatgacatacaacaaaggggacaccaaagagattgacgcgcacaagcaagagtcgggcatcgcacctaactttgtgcactcacaggatggtagtcacctgcgtatgaccgtagtgcacgctaacgaggtctacgggattgactccttcgcgctcattcacgactccttcgggaccattccggcagacgctgggaatctctttaaggcagtccgtgagaccatggtaaagacctacgaggataacgatgtgattgcagacttctatgaccagttcgctgaccagctgcacgagtcccagctcgataagatgccagaagttccggccaaaggggacctgaatctgcgcgatatcttagagtctgacttcgcgttcgcctaaggtctccagcaattaggtagcactatagggaaccttcgaacgaccgagggttccgttacttaaagtcttaacttaaagaatacttaaagaggcacgctatgacttactcaatcgttgtaaccatcttgttaatcatcatcacagcactcttcattatcaccatgcgtaatgcaatacgagatggggaacgcttggagcgtaaggtgcaggaggtaagctctcatcttaacaatgagtcagccaaggtgatacgactggcagacaggaccgagtctcttggtagagaggtgcactggttagagggcgaacttgagagcgagaaacagaaggtgcgcgacgtgaacgaactacgtagccgccaacgagaccgcatgaagtttctgcgcaagtcgctagatgacgcacaaaacgagctgctgatggtctccgacctgattcacattaaattcaccgcacgattacctgatggtcagccagtaaagacgctctttaagttaggacttggaccgtgtggtctacacgttaagtccctccgctggaccgagctggaagaccgctatctgatagaccagctgtgcaccaatggcgagcgtaagcagttcgtctactacaagggcgaagtagtaggacgcatcgagttccgccacggtaagtctgaataaggtagcactataggaacatactcaaggtcatcgtattccggtggccttcatgaatgtcccttacgagcacaatcaggagtaacaccatgtaccagaacacaatcaactttgagcgcaaccgtgaacgtcagcagaccgagggttatatccctaagggccgcaagctgaacaagacgaaacgcggtggtggcgtgaagggttccttccgtaacgcgaagggtgacagcgttgttaaccaagagaaatacttcgtaggagcgtaacaaatggctgagcaaactaaatggctgttcgacgggagcacatcacagtggtcacgactaggctacacagagcgccgactttttgaagacactgggttgacggtcattatgactcaagactggagcacacaaggtgttacactctcggtgcgcgagccgcgcctctatggtggtcaatgcctagtagagaagaccttcagtcgatggtcaattgactcagcgtcagactggctggcaaaactcatagccgactactcaagttggaaatgattaggtagcactataggcagactcaaggtcatcggattccggtgtcctttatgactgcttattgcatactaaatgaacactacacttcggagacatcatcataatgaacattaagactaatccatataaggccgtttcatacgtacgctctgctatcgagaaggcgctggagacttccggttatctcatcgcagacactaaacacgatggtgttcgcgggaacatttgcgtagacaatacagccaacgcagcatggctcagccgggtctccaagaccatcccggcccttgagcacctcaacggtttcgatgtgcgctggcagaagttgctgaaagatgaccgctggatttttcctgatggcttcatgcttgatggcgaactaatggtcaaaggcgtggacttcaacacggggtctggccttctacgtaccaagtggaccaagtgtggtaacttcgattaccatacagacccgatggccccgctgaaggttccgtttgaactcgacactaagcaccttcaagtcgtcctctacgatatcattccgcttgacattatcgagtccggcgatgactacaacgtgatgaccctcctccgccttgagcacgtcaaggttgccttaccagttctgcaagaccacttccctgaagtcgagtggtgcctctcggagtcccatgaagtttacgacatggacgaactcgatgcgctgtatcgacagaaacgagaagaaggtcacgaaggtctggtggttaaggaccctcgcagtatctataagcgcggtaagaagtccggctggtggaagctgaagccagagaacgaggctgacggtgtcgttgtgggactaaactggggaactcccggtcttgccaacgagggcaaggtgattggcttcgaggtcctccttgagtctggccgagtagtgtccgctaacaacatctctcaggcacttatggaagagttcacacgagccgtggaggccacagcagaccatcatgaaggttcctacactaacccttacgatggctgggcgtgccaaatcaagtacatggaggaaactccagatggctctctgcgccacccgtcgttcgataaatggcgtggaacagaggaagaccctaccgtcaagatgtaattatgtagcactataggagacaacaatatgtccatcaatctgattctaatcatcgtgttcatcctcgcggctatcgtgtggtcaatgaacgacgaaccaccatatagcggaggctaaaccatgcgcttacacttcaacaaatccaacggtatcttctcggttcgccgggaggaccgcagcactgtagcagccactgagcgccacggtaagattccacgtatcggcgacaccttcgagctggcacccagtgtgcacaccttggttactcgcggtctctacgaattggctcagacaaagagccgtcctttcgtacccgttgtggtaaccaagtggccacgccttcgcctgttctgggagcgcatcaaggaggtcgtaaatgactgaggtagcagtgtcaaccttctgtgaggcctgcgcgtttgatgatgaccgttatcctcacacctgtaagccaaaggtggcacagtcaggaactatctgcacagcctgtggcacccgtgacgagaaccacgtgaaatcctgcccgaaccgcctagacaaaaagtctgacgctgtgaaggctccgagtcattaccagctgttcgacggtactgagtctatcgaagtgattgcccgtgcgatgaccataagcgagttccgtgggttctgctttggtaacgtcctgaagtaccgcctgcgggcaggaaagaagtcggaccttgcgaacatggagcaggaccttaacaaggcagcattctatcaggagctgtttgataaacacaagggtctatgctatgacgccaagtgactggtgccgagcgatgtacgagaagacgctcgaccctgcgtacatcaccctgtataacatgtggaaggagcgagaagatgcaaaagttcgtcgtaacggtcgagacagctaacgcatcgtatgaactcccggtacacgctgggtctcttgaggaggccctcgaagttgccgaggcggagtacgaagagttaggccaagtgactcgggtacgcccagatagtcattaggtagcactatagggacacaggttgtccctcttactgtttaaacttaaaggagattcatcatggcattcgctaagaagaagatttataccaccaagattggtacctgtgagccgtatgcttacttcaacaagccggactatggcggtgagggttttgagaacccacgcggtacctacaaaggttccgtaacgttcaagaacgaagactgtcaggagctggtagacctcatcgttaagacccatgaggaaaactacgcggcacgtctggaagcgcatgaagcgaaccctcctaagtttcagaagggtaagaaacctctgaagccgtacgaaggcgacatgccgttcttcgacaatggtgatggcaccaccacgttcaacttcaagtgctacggttcgtacgaggacaagaagactggcgagaccaagaagattgttctgggtgtagtagacgctaaaggaaagcgcatccaagacgttccgatcatcggtggtggttccaaagtgaagattcgcttctcgctggtaccttacggctggtctgcggtagctggtgcttccgttaaattgcagctggaaggcgttatgctggtcgaactggctacctttggtggtggcgaagacgactgggctgacgaagccgtagaaggcggttacgaagctgacgaatctcgcagccgtaaacctcaggaagacccggaagactggtctggcgaggaagctgacgagggtgaagctgaagaagacgatgacttctaatggctggctatggggccaaagggattaggaaggtgggtgccttccggtctggccttgaggacaaggtgtccaagcagttagaatcaaagggcgtcacgttcgactacgaattgtggcgcatcccttacgttattcctgcgagtgaccacctttacactccagacttcttgctgcctaacggtatcttcgtggagactaagggtctctgggaagccgaggaccgcaagaagcacctattgattcgtgagcagtacccggagttagacatccggttggtgttctcttcgagtcgcactaagatttacaaagggtcgcccaccagttacgctgagtggtgcgagaagcataacatcttgtttgccgacaaattgattccagtagactggctgaaggagccgaagcgtgatgtaccgtttggcaagttcaagcagaagaaaggagtaaagtaagtatggctaaggttcaattcactaagcgacaggagacctctcagattttcgtgcactgttctgccactaaggcaaccatggacattggtgtccgtgagattcgccagtggcacaaagagcaggggtggctggacgttggctaccacttcatcatccgccgtgatggtaccgtagaggcgggccgtgaccaagatgctgtaggttcacacgtcaagggctacaactcgacttctgtcggtgtgtgtctggttggaggcatcgacgctaagggtaaccctgaagcaaacttcacgccagcccagatgcagtctctacgctcactgctggtagaactgaaggtgcaatactccggggctgtgctaatggcacatcacgatgtagcacctaaagcctgtccaagcttcgacctgaagcgctggtgggaaaagaacgagctggtcacttctgaccgttggtaaacattaggtagcactacagggagacaattacgtttccctgttgtcgcttgaggagattactttatgaacaagttcaaagagcacttcgacccaatcccattcctagcgtacgggctgttaggcttgtgggcgatatccttcgtggtctcatttgtcgcatcatacatcaacggtacctcgttatgagttacggagatagtcaagaagacggtcaggagagtatcttcctgttccacgctccgtgcgaaaactgtggttcttctgatggtaactcagtgtactctgacgggcacgagtattgcttcgtgtgtcaacaccgggttcccggctcagaggagcgtaccgaaaagttatcatcaagaagacccaaaggagggaattacgggatgaatacacaaggttcaggcttattggtattcggcgagaatgatggtcggtacactgacctgacggctcgtggtatctcaaaggcgacatgccagaaggctggctattgggtcgccaaggtcagagggactgcctatcaggtggccgactatcgtgaccagaatggctccatcgtctctcagaagctgagggacaaggagaagaacttctctaccagagggtctcacaaaggggatgcactgttcggtaagcacctatggaatggtggcaagaagattgtcatcaccgagggtgaaatcgacatgttaaccgttatgcaacttcaggattgtaagtggcctgtggtttctctcggtcacggtgcgtcagccgcaaagaaaacttgtagcgcaaactatgagtatttcgatagcttcgaccagattatcctgatgttcgatatggatgatcccggtcgtgcagccattgaggaagccgctcaggttctccctcccggtaaggtacacgtagcggtactgaccgagaaggatgccaacgagtgtttactcaagggcaagggcaaggaggttctcgaccagatatggaacgcggccccttgggtgccagatggtgtaattggtgctatgtccatgaaggaccgggtgcgagaggccatgaccagcgaacagagcgtgggataccttttctcgggatgtccgggactgaacgaccgaaccttgggtgcacgtggtggcgaagtcatcatggtcacttctgggtcaggaatgggtaagtctacgttcgttcgccagcaggccctagggttcgccagaggtcaaggactgcgggttggcatggcgatgcttgaggagtccgtagaggagaccatggaggatgtcctagggattgctaacggcatccgcttgcggcagcagcctcgggagttcaagcagaaactgatagaagacgggacgtatgacaaatggttcgatgagctgtatggcaccgaccagttccatctctacgactcctttgcggaagctgaggtggaccgcctgctggccaagctgcattacatgcgcacagggttgaactgtgacgtaatcattctggaccacatctcaatcgtagtgtcggcctcggaggaatccgatgagcgcaagatgattgaccgactcatgaccaagctgaaagggttcgctaagtcaaccggagtggtacttattgttatttgccacctgaagaacccggagaaaggtaaagctcatgaagaaggacgtgctgtttccattactgacctgcgtgggtctgggtctcttcgccagctctctgatactatcattgcacttgaacgtaatcagcaaggggatatgcctaatcttgtcctccttcgtattctcaagtgtcgctttaatggtattggcgttggcattgcgggatacatggagtacaacgaaaagacaggactccttgaaccgtctagctacactggcggagaaggagagggagatactggctgggaaggccacgaagaagacgactactgagtcagactggaagttaacaacacaatgtaattgcccatgggataggccgtgtgtctgtcctgaccgggcttaatcaacctgaggagaaccatcatgtttaaacttatcgaaacattaggccgtctggtcatcgcgctgtatatccgtgaagccaaggcgctgaacaaatcgtccaaggtggaagcagaagcagccgctaagctggctaaagcagcagacaaggcacgtcaggcatctctggatgcaacagcagaggcagcgaaagttgcacttaaagcccagaaacttaaggagttcttctaacccatggatatttacgtgctagtcggtatgcttattggcatcctgctcatacacctatcaacataaggagttcttctaatgactaccaaagctaaattccccggcaataccattcagctgtcagacactgtagaccagtggggtcgcaaggttcacatcaacgttcgcaacgacaaggtgactctggtctaccgctggaagtctaagagcgataaccgtgcgcacactcagcgcgttaccctcgacgatgttcaggcagctcgactgctggcatccgtagccgtagcggcgactgtggctgtgggtgaagacaaggtgcgtgaggttatcctgagtaaagaggtaggctcaacagcaacccgactggctgaagcgtcagaagctaagtgataaactcaaggtcattactatatgtagtggcctttatgattatcacacacaacatattgagaggacataaccatgcgtaaacctgaagaaatccgtgcagacatcgagaagctgaccaaagagctggctgccgccaagacctatgaggccaagcgtgacgctgccgtccacattcttgagaaccttgggtggacccacagtggcctcaagggctggcagaaacctgcgccaaagtggagtgactataaggctccattgaaggctggcgagcttgcaatttgggaggaggggggacattggcggtacagtctacatacgcagtgtgggcaataagtatgctcaggtgtcccacgttcgtggtgttagtagattgggagctgatgtactgaacagtagctttgctgtagagaagagtaagttaaccgtgcgtcctcgtgagtatttcattgggcgtcgttaagtaacaggagaccactatgttagtatccgatatcgaggcgaacaacctcttagagaaagtcactcagttccactgtggggtaatctatgactacagtacggacgagtacgtatcgtatcgaccttgggacttctcagcgtatctcgatgcgttagaagccgaggtggctcgtggtggtctcatcgtattccacaacggtcacaagtacgatgccccagtgttaaccaagctggccaagctccaattaaaccgagagttccacctgccgcgtgagaacgtagtggacacgttggtgctcagtcgcctgctgtttgcgaacatcaaagattccgacatggccctgctgcgttccggtaagttacccggtaagcgcttcgggtctcacgctctggaggcgtggggttaccgcttaggcgagatgaagggtgagtacaaggatgacttcaagaagctccttgaggaacagggagaggactatgtggacggtgctgagtggattagcttcaacgagccgatgatggactataacgttcaggacgttgtggtgaccaaggcgctcttagagaagttgctgagtgacaagcactacttcccggatgacgttaactttaccgattgctgtactgatgccttttggtatgattcctgcgaggccgtctggctggagcacagagctgcgtggttgctcgctaagcaggagcgtaacggcttcccgttcaacaccaaggccatcgaggaactctacgttgaacttgctggtcgtcgttctgaactccttcagacactcaccgacactttcggaacttggtaccaacctaagggcggcactgagttattcctgcaccctcgcaccgggaagcctcttggtaaatacccacgagtgaagtacccgaaacagggtggtatctacaagaaacccaagaacaaagctcagcgtgagggtcgtgaaccctgtgagctggacactcgggattacgtagagtgtgctccgtacacaccagtagagcacgttgtgtttaacccaagtagccgagaccacattgcactcaagctgaaggaagccggatggatacctacagagttcaccgataaaggtgcgcctaaggttgacgatgaggtccttgagcatgtgcgtgtggacgaccctgagaagcagcgctgtattgacctcatcaaagagtacctgatgatacagaagcgcataggtcaggcagctgagggtgacaaagcgtggctacgttacgttcaagaggatggtaaaatacatggttcagtcaatcctaatggtgccgttacgggccgagcgactcacagcttcccgaacctcgggcaagtaccgggtgttcgaagtccttacggcgagccttgcagggctgcttttggtgctgagcatcaccttgatggcctcactggtttaccttgggtacaagctggcatcgacgcaagtggtctggagctgcggtgtctcgcccacttcatgtccaagtacgacgggggagcttatgcagatgttattcttaacggggacatccacacagtaaaccagcaggctgctgagctgcctacacgcgataacgccaagacattcatctacggcttcctctatggtgctggtgatgaaaagattggacaaatcgttggagcaggtaaggaacgcggaaaggaactcaagaagaaattccttgagaacactccagcaatcgcagctttgcgtgaaggaatccagcagaccctagtcgagtcatccagatgggttgccggagagcagaaagtcaagtggaaacgtcgttggattaagggactcgatggacgtaaggtacacgtacggtcaccacatgctgcactcaacaccctccttcagtcagcgggcgcgctcatttgtaagctctggattgtcgagactgaagagttacttctcaaagctggattaaagcacggttgggatggtgattttgcgtacatggcgtgggttcacgatgaaatacaagtggcctgccgtaccccagagattgcacagcaggtgattgacattgcacaacaagcgatgcgtaacgttggggaacactttaagttccgatgccgtctggatacagaaggtaagatgggtccgaactgggccgtatgtcactaatactatacaggagatttatcatggctatgactaaacgtgtgcgcgtaacatttgactctaagtttgtagcaggtacgaatgatatcaacgagttcgctaagacacttgtgagctactctaagcgcttcatggagggtgatagtaccctaaaaggcgaccagctggctcttgcagagatggcggcgaaggaaggcgtagaggctgctgtggaactgtctatcaaaatgtcctactcaaaagctatcaagagtgaactagctgacgactgcgtgacagtctccaacattcgaatggagattaaacagtgagcgagtacctaaaagttctggcggccctcaagggctgcccaaagtccttccagtcgaactacgtgcgtaacaacgctgcgttagtcgctgaggctgcgagccgtggtcacatttcgtgtctgaccatgagtggccgtaacggtggcgcttgggaaattaccagtgccggagtgaaattccttaagactcatggaggttgcttatgaaagacttcttaggaaatactatagagattggggacaccattgtctacgcagacactggaggtcggggtggctcatctactctgtacaaaaccgttgtcactaagatgactgagaagcaggtgttggtcgccgaatcttcgtggtcaaaactgtggcgtccgttcaaccgggtcgtggttgttgccaaaggaggttgcctgtgagaaagagaatggtgttcgtgcacccgttggaacctaaatcacactgggaaactgctgatggcatcgtctggttttataaggaaggccacatgctgcgacagtcccatgtcacccacaaggaccttcacgacccggagatgggctttaagttcaaggagttaaagaatgagtaagcacacattgttatccttcagtgactaccgggcaacccagaagattgccaagggtgttcttgtgatggatggtgactggctggtattccaagccatgagtgccgctgagttcgatgcctcgtgggaggaggagatttggcaccgttgctgtgaccacgctaaggctcgcgagattctggagaactccattgaatcctacaaagggcgcaagaaggcgtggaagaatgcagacgttgtcctagcgttcactgaccgtgtcaactggcgtaagctgctggtggacccaacgtacaaagagaaccgagctgtcactaagaagcctgttggttacttcgagttccttgaatccgtctttgaaacctacacgtgcgtccttgagcctcagctcgaaggcgatgacgtgatgggtatcatcgggtctaaccctctcgtgtataactacgagaaggccgttctggtctcctgtgacaaggactttaagaccatcccggattgtgatttcctgtggtgcacgactggtaacatcctcgttcagactcaggagaccgctgactactggcacctcttccagactatcaagggtgacatcaccgatggttacggtgggattcccggatggggtgataccgctgaggacttcctcaaggaaccattcattgtggagcctgtaacgtccgtactgaagtcaggtaagaacaagggccaagaggtaaccaagtgggtgaaacgcgctcctgagccgggagagacgctctgggactgcattaagtccattggtgccaaagcagggatgaccgaagcggaagtaatcaagcagggccagatggctcgcatcctccgttctgatgagtacaacatcgagactggggagattactctatggcaaccgggcagttaattctcatcgtcctgaccatgggcttaatagctcgtggtatctggatgttggccttagttatcaagcagatagctgaccacaagcgcaagtgataaactcatgggcactaattaggtagcactatagggaagtgcccattatgattattacttaaagattacttaaagaggagactcaaatgttaaaacctatagagcacatccttaacaatcctaatgaccttcctgacgtaccgcgagctgtcaaggagtacctacagtctcgcttcaatgctgacttcctgtatcaatcagaggtccgtaagctgcgtgaggcgggtcacagtgaggagttcatctccggggtactatatggtcaccacatggcttcgcgtgtccttgatgagatggagggccgtcagcgtgcactcaaagaaggagattgattatgtgtttctcacctaagatgaaagcacctaaggttgacacaacgactgtccctgagccagcgccactcactgaggaaccaaagggtatccagtatggtggtgacgaggattcaaacagcaccactcctgaggtgtcagggcgtaagtcactcaaggtgaccaagacgaccgagcctacagggtccgtcagtaaaatccgtaagtcggctttaggaggctaacatgggactgttcaagaaaatcaagaaggctatctccaaggtagtcaaggcaccactcaaggccgtgggtctggcagcagatgcacccaacgtgcagacagccgctgagacacctgtggccgcacctcaggaagcaccgaaagaggtcgtggaggacgttgagtcttcggcagacactgagtctggtaagaagaaaactcgcgcctccggtaagaagtccctctcagtttcccgcagctcaggcggtgggattaacttatgattggttacggggagggctaacaaatggcagaagttaaactcgaaggcttcgcagaggagggagccaaggcggtatacgaccgtctgaagaacgaccgacaaccttatgagacacgagcagagtcctgcgctcagtacacgattccctcactgttccctaaggactccgataacgcctcaaccgattatacgactccgtggcaatccgtaggtgcacgtggcctgaacaacatagcgtccaagctgatgctggccctgttcccgatgcagtcatggatgaagttgaccattagtgaatacgaagcgaagaaccttctgggtgacgctgagggtctcgctaaggtcgatgagggcctctcaatggtagagcgcatcatcatgaactacatcgagtccaacagttaccgagtgactctctttgagtgcttgaagcaactgtgtgtggccgggaacgcgctgctgtacttaccggagcctgagggttatacccctatgaagctctatcgactgaactcgtatgtggtacagcgagacgctttcggtaacgtactccagattgtcaccctagacaagattgcgtttaacgctctccctgaggatgtccgcagccaagtggaagcagcccaaggtgagcagaaggaagacgctgagattgacatctacacccacgtatatctgaacgaagccggggatggttactcgaagtacgaagaggttgccgaagaggtagtaccgggcagcgaagctgagtaccctctcgaagagtgtccatacattccggtccgtatggtacgcatcgacggtgaatcctacggacgttcctacgtggaagagtatctgggagacctcaagtccctagagaacctccaagagtctatcgtgaagatggcaatgattaccgccaaggttatcggtctggtagacccagcaggtatcactcaggtccgcagactcacggcagcacagtctggtgcgttcgtaccaggccgtaagcaggacattgagttcctccaattggagaagtccggtgactttaccgtagcgaagaacgtaagcgacaccattgaggctcgcctctcgtatgtctttatgctcaacagtgcggtacaacgtacaggcgagcgagtcacagccgaagagattcggtacgtggcgtcagagctggaagatacccttggcggtgtctactcgattctctcgcaggaactccagctgcctctggtaagagtgctcttgaagcaactacaagccacgcagcaaatcccggagttacctaaagaggccgtcgagccaactatcagcactggccttgaggctatcggacgcggtcaggaccttgacaagctggagcggtgcattaacgcatggtctgcccttaaggctctcgaaggtgatgatgacctcaacttggctaacctcaagttgcgaattgctaatgctatcggactcgacacagctggtatgctgctcactcaggaagagaagaacgcccttatggcacagcaaggtgctcagattgctacacagcaaggggcagctgcgctgggtcaagggatggccgctcaggctactgcaagtcctgaggcgatggcagctgctgctgattccgtaggtatgcagccgggtatgtaattaggtagcactatagggagacacatccagagtgagtgagttctggtctgaaggttcgagtccttcgtgttttccctcttagtcttaaatttaaggagattgaaatggctggcgaatctaacgcagacgtatacgcatccttcggtgtcaacagtgctgtgctgactggtagtacacctgaggagcaccaagaaaacatgttggctcttgatgttgctgcccgtgatggtgatgatgcaatcgagctgaacaccaacagtgatgacccgtatggctccgatgtggacccgttcggtgaacctgaagagggccgtatgcaggtccgcatctccgctgacggttccgacgaagagtctaccgaaggtgaagagggttctgaagaagaacagcagggcgacgaagggagtcagccggaggaagtaaccgacgatggcgaacaagaagagttcaaaccgattggtgaaactccggctgacataaacgaagcctctcagcagctggaagaacacgaagctggctttaacgacatggttgccactgcaatcgaacgcggtctctcacaggatgctgtgacacgtattcagcaggaataccagaacgaagacagtttgtccgatgagtcctaccgagagttggccgaggctggctacagtaaggcgttcgtcgatgcgtacattcgtggtcaggaagctctggtcaaccagtacgtcgagaaagtgatggacttcgttggtggccgcgagcgcttccagcaggtctacggtcacatgaagaccaacaaccctgagggtgctgaggcactcatcaaggcttttgaatcccgtgacgtagccaccatgaagacgattctgaacctagcgggacagtctcgtgataaaacctttggtaagaaagctgagcgcactattaccaagcgtgcaaccccagcgaaacctgcggcccgtaaggctgaaggcttcgagtctcaagctgagatgattaaagctatgtctgacccgcgttaccgcaccgactccaagtatcgtcgtgaagtggaacagaaggttatcgactctaagttttaattaggtagcactatagggagaccccagcgccgatgaaaggctgggacttctcccttcgagttacacaatgagtatcacctcgtttcaagtagtacctcaaaacattacgtataaacaacataaggagattcaacatggctaacatgcaaggtggacagcagctcggtactaaccaaggtaaaggtcaatccgcagcagacaagctggcgctattcctgaaagtattcggcggtgaagtcctgaccgcattcgctcgtacctctgtgaccaccaaccgtcacatgcagcgtcaaatcagctccggtaagtccgcacagttccctgtgattggtcgcaccaaggctgcttacctgcaaccgggcgagtctctggatgacaaacgcaaagacatcaagcacaccgagaagaccattaacattgatggcctgctgactgcggacgtgctgatttacgacatcgaagacgcgatgaaccactatgacgtgcgctccgagtacacctctcagattggtgaatctctggcgatggcagctgatggtgcagttctggctgagctggctggtctggttaacctcgctgattccgtcaacgagaacatcgctggtctgggcaaaccgtccctgctggaagttggtactaaggctgacctgaccgacccggttaaactgggccaagcggttatcgcgcagctgaccattgctcgtgcggctctgaccaagaactacgtcccggctaacgaccgtacgttctacaccaccccggacgtgtactctgcgattctggctgctcttatgcctaacgctgcgaactatgcggctctgatcgaccctgagcgtggttctatccgtaacgtgatgggcttcgaagtcgtcgaggttccgcacctgaccgctggtggtgctggtgataaccgcccagacgaaggcgcagatgcgaccaaccagaagcacgccttcccggcaactgtcggtaaagtcaacaaagagaacgttgtaggcctgttccagcaccgttccgctgttggtactgtcaagttgaaagacctcgctctggaacgtgctcgccgcgctgagtatcaggctgaccagattatcgctaagtacgcgatgggtcacggtggtctgcgccctgagtctgcgggtgcgctggttttcacggcggcctacgcgtaaatacctttagtgctcgggtggtaactccacctgagtacgaggtacagactgtagccattgatggtgattcacttaaggtggcactcgatgggctggagagtgtaacggactggtcaacccttgaggtaacttatggtacttcagggattgtcagccatactcgccggaccaacacgctgtacttcaaaggaatcgctgtaggcgaaactctggtgactgtcagttttgaggggtctgaaaggaagacctttaagctggtcgtgactaactaataagccaaaccccttggggaccactcacggtctctgaggggttttttcgttaggagcttacattatgaacatgcaagatgcttactttgggtctgccgctgagctggatgctataaacgagatgctctcagctatcggtgaatccccggtgaccacccttgacgaagatggtagcgcagacgtagcgaacgctcgtcgtatcctcaacaggattaaccgccagattcagtctaaaggttgggcattcaatattaatgagtcagcaacattgaccccggatgccagcactggactcattccgttccgtccggcctacctgtcaatccttggtggccagtacgttaaccgtggaggttgggtgtacgataagtcaaccaacactgacaccttctcaggaccaattaccgtgaccctgattacccttcaggattacgacgagatgcccgaatgtttccgccagtggattgtcaccaaggccagccgccagttcaactctcggttcttcggagcggaggacgtagagaactctctggcacaggaagagatggaagcacggatggcgtgcaatgagtacgagatggacttcgggcagtacaacatgcttgacggtgacgcatacgttcagggcctcatcggtcgttaatcagaaacttaaggaggaccaaatggctctcgtatcacaatcaatcaagaacctcaagggaggcattagccagcagcctgaaatcctacggtacccagagcagggttcacttcaggtcaacggttggtcctccgagactgagggtctccagaagcgacctcccatggtgttcatcaagtccttgggaggtcgtggatatcttggggaagacccctacatccacctcataaaccgtgacgaatacgagcagtattacgccgtgtttacagggaatgacgttcgggtattcgacctgtccggctatgagtatcaggtccgaggggaccgctcgtatgtgatcgtcaataaccctaaggacaacttgcggatggtcactgtggccgactacacattcatcgtgaaccgtaccagacaggtccgtgagagtcagcacttgaccaacggtggtaccttcagagataacgtggacgcactcattaacgttcgcggtggccagtacggacgtaagctcgaagtgaacattaacggcgtctgggtaagccaccagctccctccgggtgacaacgctaaggatgacccacctaaggtagacgcacaggctatcgctgaggctctagctgctctactcagagcggcacatcctacgtggacgttcaatgtgggaacagggttcattcactgtattgctcccgcagataccaccattgacatcttggagacaaaggatggctacgcggaccagcttattaacccagtgacccattatgtccagagcttctctaagttacctctgaacgcaccagatgggtacatggtgaagattgtcggggacacatccaagaccgccgaccagtattacgttaagtatgacaagagtcagaaggtctggaaggaaactgttggatggaacatctcgatagggctggattacaccactatgccttggacactggttcgcgcagccgatggtaactttgacctcgggtatcatgaatggaaggaccgacgcgccggtgatgacgataccaaccctcaaccatcctttgtgaactcaacgataaccgacgtgttcttcttcaggaaccgattagggttcatctctggggagaacattgtgatgtcccgtaccagtaaatacttcgagttctacccgccgtcagtggccaactacacggacgatgacccgctggatgttgctgtgagtcataaccgagtgtcggtcctcaagtatgctgtgagcttcgctgaggagcttctgctgtggtctgatgaggcacagttcgtcctgtcagccaacggggtgttatccgctaagacagcacagctggacctgaccacccagttcgacgtgtcagaccgtgcgcgtccttacggtatcggtaggaacatctactatgcgtctcctcgcagctcctttacgtccatcatgcgctactacgcggtgcaggatgtaagctctgtgaagaacgcagaggacatgacggctcacgtaccgaactacatcccgaacggtgtctatagcatcaacgggtctggtacggagaacttcgcgtgtgtactgaccaaaggtgcccctagtaaggtgttcatctacaagttcctctacatggatgagaacatccggcagcagtcatggtcgcactgggacttcggtgatggtgtggaggtgatggccgcaaactgcatcaactcgacgatgtacatactgatgcggaatgcctacaacgtgtggatagctgcggtggactttaagaagaactctacggactttccgttcgagccttacaggttccacgtggacgccaagcggtcatatcacatctcagagactgcgtatgatattgagacgaaccagacggtagtgaacatcaaggacatctacggtgcgtcgttctctaatggtaccgtggcaatctgcgagagtgacggtaaaatcaccgagtacgagcctacgggttcctcttgggattcaaccccggacatccacattagcggtgacatctccggtaaggacattgtcatcgggttcctgtatgacttccagtatgtgttcagtcggttcctcatcaagcaggagcagaacgacggcacaacgtccactgaggactctggtcgcctacagctgcgcagagcgtgggtgaactatcaggacactggtgcgttcactgtgagtgtcgagaatggcaaccgtgagttcaactatctggtcaacgccaaagtaggctctacgggtctacgtctgggccagaaggccacgactactggtcagtatcgtttcccggttacaggtaacgcactgtatcagaaggtttccttgagttccttcaacgcttccccggtgtcaatcgttgggtgcggctgggagggtaactacatgagacgcgctaacggtatttaactgaacgtctccctgtggtgccactcaattaggtagcactatagggagaccacactaagaggggacttaaagcatgtacataagaaacactgtaagtaatgacttcgagttattcatcccggcctaccatgacgtacttgaggcgcaggccatgggtatagaaccatcgttcccagcggttactgagtgtgtcacgttagaccacgatggttttcctttggctataggtggacactgtggagaccagtgctggttcgtcacgagcgaccaagtgtggagactcgacagggctggtaagctggagttccgtgagagaatcatggagtacagggacatgttattaaatgtttatccatccctgtggaacttcgtgtgggtcggcaacggtccccacaagcggttccttaagtccatcggtgctgtattccacgaggagtacactcagggtgggaagttccaactgttcaccataacgaggaggtaactatgtgctggatggcagctattcctattgcaatgacagcagtacaagccatcggtcagtcgcgcagtgaagccaagatgatcggtcttcagaatgaccagatgcgccgacagtccgcccagatgattaaagagtcaaacattcagaacgctaacgccagccttgagcaaaagcagaagctggaagaggctagtgcagacttgaccgctaagaatctcgacaaggttcaggccatgggtacaatccgtgcggctatcggagagggaaaccttgagggtgccagcatggaccgtatcagtcgcatcgaagagggcaagttcattcgggaggccaacgcggtcaccgataactaccgtcgagactatgcgtcactgttcgcccagcagctgggtaactccgagtcaactattgaccaagttaagtccatgcagaaggctgagggcaaaggtaagtccaaactggaacaggtgctggacccgctggccttaatgggttcgcagggtgcctcagcgtatgcttccggtgcgttcgatagcaagggcaccaaggcaccaataagtaaggcccaaggtactaaggtaggaggtaagtaatggccagtaaattagaacaagcattaagacaactcccacaggccgggtctacccgaatccgtggcggctcagcgtccatgcagtatcgcccggtgaccatccaacaggaaggtgccagacagtccaacctagtgcagtccttggcgaagtttgggacagcagtaggagaagcagcggacgcatacgacaagcgccagcgagacaaggctgacgagcggtccgatgagattatccgtaagttgaccccagagcaacgtcgtgcggccatccagaatgggaccctgctgtatcaggatgacccgtacgctatggaggccctgcggttcaagactggccgtaacgctgcgttcctcatagacgacgaagtggcacagaaggttcagaacggtgagttccgcactcgtaccgagatggaagagtacagacacaagcggttgaccgaaggtgccaacgagtacgctgagcagttcatgattaaccctgaggactctgagttccagagagggttcaatgcgaacatcaccgagcgtaacatctcactgtatggtaagcacgatacattcctgagcgaacaggcacagaagggtgccatactggcctcgaaggtggagctgtcaggcgtgcttaaagaccctgccgttcttgcccgtccagagtccggtgagttcttccagcgctacatcgacaacgcgattaagaccgggagtatccctagcgacgctcaggcacaacaggtcatcatcgggtccctcaacgacgtcatccagcgtccgggtgcgaccaacttcttgcagagccttgagggccgtccggtcacccttaacgggaagaccacgacctacaaggaacttatgggagaggagcagtggaatgccctgatggtcaaggcccagtcaacccagttcgacaatgacgctaagttgtccgaaggtttccgccttgggatcaccagtgcgttgaaccaagacgacaccagcaagggctgggagatgcttcagggtgccaaggcagaactggatcgtctgcaacccggtgaacagatgacacccgagcgtgagcgcctgattcaagctgaggaacagatgcaggcccgtttccgtcaggaggcccaagcggtagccaaggagatggacaagcgtcaaaagaccattaacaagaatcaggtcatcgaccagcagttcaccaaacgcatcaacgggcagtatgtgtccaccagctacaaggacatgccgaccaacgagaacactggcgagttcactcacagtgacatggtgaattacgctaacgggaagctggctgagattgaccagatgcagctcacggagcaacagaaggaccgcatgaagctgagctacctacgggcagactcagagggtggagccttccgtaccgttgtaggccagatggtcaccgacgctgggtctgaatggtctgccgctgtgattaacggtaagttgccagaggacaccacggcgttgaacaagctgcgcaccatgcgtaacaccgacccggacctcttcgctgcactgtacccggataaggctgacttgtttctgacgatggacatgatggacaagcagggtattgacccgcagattcttatcgacgctgaccgttcccgccgcagtctcaccaaggagatgcagtatgaggatgataaggcgtgggcgtccctgaagaacaactcagagtccccagaactgtcccgtatcccagcaagtctggatggtatggcccgtaagatttatgacagcttcaagtaccgcacaggtaacagtgatggtgccatgcagcaggtcgataagttcctcaaggaatccactgtgaccttcaaaggtgatgacatggacggtgataccattggtattatcccgaagaacatcctacaggtcagtgatgaccctaagagctgggagcaaggccgagacattctcgaagaagcccgtaagggaatcattgcggctaacccttgggtgacaaacaagcagctgacgatgtaccagcagggtgactctatctacatgatggacaccactgggactgttcgcatccgctatgataaggagctactgactcgaacctatcaggaacagcagcagcgactggccaaggaagccgaagagaaggcactgaaggaagcaaccaagcgtgcacctatctccgcagccactcaggcccgtaaggcagctggtgagcgcgtacgtgcgaaacgtaaagccactccgaagttcatttatggaggtggcgatgagtaaacaataaggagacaacatgagctacgacaagtccaaacctagtgactacgacggtatgttccagaaggcagcagacgcacacggtgttagttacgacctactgcgtaaactgtccttcaacgaatcatccttcaaccctaaggccgtctctaagactggccctaagggcatcatgcagttcaccaaagcgacggcccggagcatgggccttaacgtgaccgatggtgatgacgatgggcgctacaaccctgagttagccattgatgctggcgctaagctgcttgccagtctcgttaagaagtacgacggtgatgagctgaaagcggccctagcgtacaaccaaggggaaggcccagcgggtgcccctcagctccaagcgtacgacaagggagacttcaggtctatctcggaggaaggtcgtaactacatgcgcaagctgctggatgtggccaagagtccgaactcaggcgcactggaggcgttcggtggtatcgccccaaagggtaaagggattcccgcagaggatgccttcaagggcatagctaagactggtaaggtaggtactgagctgccggagtcccatgggttcgacgttgaaggtgtagcgcaggaagcgcccaacacgccatacgctaaggacttctgggagaagaccgggacgactctcgacgagtataacgctcggtcaaccttcttcgggttcggtgacgctgctgaggctcaacttcagaactcaaccttgggtgtggccttccgtgctgcgcgtgctgatgatgggtacgatgtgttcaaggacacgatgaccccgactcgctggaactcttacgtcccgtccaaggaggacttacagaagctgcgggactccgggttacctccgagttactacggtgtggtgactggtggtgacggtgagaactgggatgcactcatcaagctggccaaggataactttgaggctgaccaacgggccgctgaggctggtactggggcgaaactcgctgctggtatcgttggtgctggtgtagacccgctcagctatgtccctctggtcggtgtggccgggaatggactcaaggtggtcaataaggccctgcgagtaggtgcacaggctggagcactcagtgttgcctctgagggaatccgtacgtcagtagctggtggtgaagctcactacgctgatgcagcacttggtgggttactgttcggtgctggtatgtcggctctcagtgatgctgtggcggctggtatccgtaaggctcgtggagtcgagtctgtgaatgagttcgctggtccggcactccgtatggaagcacgagagacagccatcaacactggtggtcacgatacctctacactacctccagataacttctcgttcgagcagggccacggaggcgttccatttgctgaccacccaaccgaagagggcgcagtggttcttgccaatggttccatcttgagcgacaccaacccgcttaacccaaggacccagcgtgacttcgcagagattgacccagagcgtgcagctcccggtatcaaactcggtggattcactgagattggcctgaagaccttagggtccaaggacgctggtgttcgtgcaatcgctcaggacctagtgcgctcacctacagggatgcaatcagggtctagtggtaagttcggtgcgaccgcttcggacatccatgagcggctccatgcgactgaccagcggatgtataaccagctgtatgacgctgttgaccgtgccatgaaggacccagagttctccattggtgagcagaagatgtcacgcagagccatccgtcaggaagtctacaagcgtgctgccttggcgattgagcgtccagagttacaggctgatttgaccaaaggtgaacgtgaggtgatggacctactgaaagagcacttcgataccaagcgtgagctgatggaacagccgggtattttcggtaacgctaacgccgtgagcatcttccccggtagtcgccataagggaacctacatacctaacgtgtacgataggggtgctaaggagctgatgactcagaaactaggcggacctgaaggactccaacaggcaatcgctcagagctggcttaccagttaccgagtgcgacctgaggttaaggcccgtgtggatgagtacctcatggaactcaacggttacaagtcggttgaccaagtgacacctgaggtggtccagaagcacgctatggataaggcgtacggtatcagccacactgaggacttcacggcatcaagtgtcattgacgacaacatcactggtctggtcggtattgagaacaactcgttccttgaagcccgtaacatgttcgacagcgacatcccggttaccttaccggacgggtcaaccttcagtgtcaacgacctgagggacttcgacatggcacggattatccccgcatacgaccgccgagttaacggtgatatctccatcatgggtggtagtgggaagaccactaagcagctcaaggacgaaatcatggcgttagacaagcgggccgagcgtaagggacaactgaagggtgaagtggaagccctgaaggacaccgtcaagattctcactggtcgtgctcgccgtaacaacgatacagcctttgagacggctatgcgctccctgaatgacctagcgttcttcgctaagaacttctacatgggtccgcagaacctcacagagattgctgggatgttggctaagggtaatgttaaggcgatgctacatggtatcccaacgttgcgtgacctcgccaccagaacctctccggtgtccggtagcgaactccgtgaactccatggggcgctgttcggtaaggaactcgaccagttaatccgtccggggcgtgaggacatcgtgcagcgaatccgtgaggcttccgataccagtggggccatggcgtcagtaattggtaccattaagttcggtactcaggagctgtcggctcgttctccttggaccaagatgctgaacggtacggccaactacattctggacactgcccgtcagggtgtgctcggtgatgtggctggtgcggccctaggcggtaagggttccaagtttggcaaagagaacttcctcaaagctgcctctatcagtccagagcagtggaagggcatcaagcaactctttgttgaccatgcgactcgtgatgccgacggccagttcactatcaaggacaagaaggcgttcagtcaagacccgagagcgatggacctatggcgtcttgccgataaggttgctgatgagaccatgctgagacctcacaaggtatcccagcaggattccaaggcgtatggtgctggtgtcaagatggctatgcagttcaagaacttcaccatcaagtcactcaacgctaagttcattcggtccttctacgagggctacaagaacaaccgtgccatcgacatggccctgacccacgtgttgtctatgggtatcgctgggacttactttgcgatgcaggcccatgtgaaggcttacggactccaagaggctcaacgtaaggactacctgaagaaagctcttaacccgactatgctgggctacgcagcgttgactcgaagttcccacactggtgccccgctgtctatcgtttcgatgatggctggtgccgctggattccaagacgccaacatgctgcgctccaccatcttacctaaggaggaacagttccagaagaaagatggagcgtccaaaggtcgagccgagtcgagcaaccttgcgggtaacttggggtctcaggtcccagcgctgggttacgtagggaacgtcattgcgaccgctaagaacgcttatggtgttgctacagcgcctaacaagccgactgagcgtgactacatgactggcctgatgaactccaccaaggagcttgtacctaacgacccgctcacccagcagctcataatgaaaatctatgaggcaaacggtgtgaccatcaagcaacagcctaaacctaactaattaggtagcactatagggagaccgcttggtttcccttctcattcactttaaggaggtcataatggaccaagacattaaaacagtcattcagtacccagtgggagagactgagtacgacatcccgttcgactacctatcccgtcgcttcgttagagtgtctctggtctctgaggattcccgaagactgctgagtaacatcacggagtaccgctacgtctccaagaccagaatcaaactactggtttctactgaaggtttcgaccgtgttgagattcgtcggtttacctcagcctctgagcgaattgttgacttcaatgatggctctgtgctgcgagcaacagaccttaacgtatcacagctacagtcggcgcatattgcggaagaagcccgtgatgcagccctgctggccatgcctcaggacgacgcaggtaacctcgatgcacgcagtcgccgtatcgttaacttagctcccggtattgacggcactgacgctatcaataaggaccagttagattcaacgctgggtgaggctggtggtatcctttctgatatgaaagaagtacagaaggaaacctatgactacatcgagaagctcggtgatgacacttcaattgtccgtggggtaacttgggtgtacaaccaagggtctgccgttggtggtgagactactgtactcatcgataaacctacccgcacgcttgccgttccttatatcgagattaatggtagtcgccaagaggttgggtatcacttctcgtttgacattgccacccagatgattaccttaacggaaccactggttaccggggacttcctgatggcaatgaccacagagtctagtgtacctctggaagaccttctggctaacccgactggtgcctcggctatcggtacctccgatggtcgaaacgttcaggcaaacatcgacgagcttcgctcagagttagacttcctgaaagacactacggtgctcgacgttcgccgttttggtgctgtgggtgatggtattgtagatgattacccggcgtttcagaaagcgtgtatcgctgcgagccaacttggcggggcaatagtccacgtaccgaccccaaaggtaaaatggaagattggattcccggtatacttgttcgaccgaacttgggtccggggtacaggcattaactgtattgtagagttcactgacccgctgtatgcacgcaagtcccgctctgggttcgtcattgggtctggttatgaacagaaccgagacaaggccattcagtgtcttaacgatggcacttgggccactactggctcggtggtaaataaggacttcgttgaattgggccgagggcagtacgtacgcgacaaccctagcaaggtccagtcaagactgtgccgagtgtccgggatgtacctgaaagcttcgtatccgaacggtgctaccctgaagggcggctacgctgtgtctggtgccaacgcggtagactcagaggtatttgacatttggggtgaaggttggactgagattatcaacttcgggtctgacgtaccgccagctacgccaagttgtcacaacctccatgcgtacgacatcacgtgtgttgctcctaacgactacgagacgtactacagcgcagggttcattgcgaactctacaaactgctctattggccgattcaagcagctcagggcaatagctgatggttctcctcacggttcctgtggttccatgaactacaccgagtattgctccttctacgatatcgacgtaccgagcttaggtcgtacagcctcgtctgagggtatccttgtgaacaactccaagggcgctgtgactcgtaacgttcgtattggtaacgctaagaccggggtggccgagtattacaccactggtgctggtatcttctacgacagagaccaacccaacgtgttcgatagtatccatgcgaataactgtgacaacgcggtagctctccgctccaagttctcggtttggaagaacgtgacgcagaccaactgtacctaccacgtctacttcgggaccaccaacgctcaagcctgtgtggttaagttcgtaccggacacaattggtggtggtaataacgtagacattctggacaggctccgcgataacgttgtgactggctggcgtgtgcgctcgctccacatccgccctatcgcctacctactgaacgacaagtcagtattgcgtagctgggatgctggtaagaacatcaaggctgagaacggtgtgggattccagtggttattccctgtaccacctaccatgcgtgcaatcactcaggtcagccaatggtttaccttcgaggttggtgcagcgacggccgggacagaggtcaaggttcaggttcgcagtatgtcagcgtacaacggagacgccaacgagcagcctgtaatcctctttgagaacagccgcaaggcctctctggataccgtacaggcaaccaacgttgtagcgaactcctcaggtctggtcctgacgtcccctacggatggactggctaacgctgtggatgtcctagtgagcgttacagcaccgaccgttaacttcaacatgaaagaagctcgcatcacgtatctgggcgactaactaaggagacagtatgttaaacaaattgaatcaacctaaaggctctacaatcggtgtgctcaaggatgggcgcaccatccaagaggcaatcgacgagctggataagattaagacccgcaacgttgaccctgagcgcttccgtgagacgttgacgtcaagtgacgatgaggtattcgagaagctgttcgcgtggttggccactcagtcagacgttgtgggaacctcaagttcttcctatatcacagccttacctcgcatgattgagcttagcggtcgtacctatacgttgactaagcgtcacgtgctggacggtaactttggtatacagaacggtaccatcctgatgtccggtgagggtgagattatcatgggcctcgatgctggtaccaagactcgtcgtcacttccttaagtatgtacatttcgagtacatcggggcatccgaccgtagcacctctctggtcaccatggcacgatgcttcaactctgtggtgctattctgtaacttcattgctggtggtgataccgctcgcaacagagcaccacgtacccgttatggcctgttcgcagggtccacccgatgctggggcttccagttaatcggtggtgagtactacggtggcgactgtgcgttacgtgttggacgagctaacgaccacactgggttgaccattcgtcccggtactgttcaccattcgcgtgtaatcaacatgatgttgtgtaacccagcaggtgccgaggtgtctggctgtaacattgaacacgcagacaatggggccataggcctagggattacctcgggtaccaatacctccggtaacgcagcccatggagttcgcatcaacggtgtatacttctacaacaacggtaacggctccagcggctcaaacgtatcaccggcgaatatcctcattggtaaggacattccgggtacagaaggttgggaccgaccgggcgagctgattacgtcaagtagaaacactgcgcacagcattacggtgtcagagtgctacatcgttagcccaaacacccagaacgcttggcaggttaacgccctgtacggtgtatccttcttggacaacaaagtgggcctcaaaggtgacgctacgattcacggtgtgtatgacggtacatgtgctaactgctgggctgtaggcaaccgagaccaaggcggcaaggtgttccagttctcctctacggcaaccaacgtgattctgactaccagaaagggtaagtggactccgaagattatcggtgagggcacagcaggtaacacgacgctgagtgcttctggtggggcgtactctctggataacggaatggtcaccgtgtcgtgcttcgcagtggttgacactaaggacccaaacatggctggcaacctgaacatcaaactcccggtagcctgtgaggaccagcagcggggcggtacaggcatctcgttgacgaacgttccagacgtaccgagcccgaatggtagcataattgtgataggagacaccgctcgaatcatgctggggtctgtgagactacagccagcaaacgtcacgaccggtaccgccatccacttctcagtatcctacccagcagacgttaaggtataaggagataacatgttgtccctagacttcaataacgaagttatcaaggcggctcccattgcgggggtcgctggggctgacggtgtagcgaggctcttctggggcctctcactcaacgagtggttctacgtcgcggcaatcgcctacacagtggttcagattggtgccaaggtagtcgataaaataattgactggaagaaagctaataaggagtaacacatggacctgattaagttcctcgaaatgttagacactgagatggctcagcagatgctcatggacctgaagaatccagagaagcggacccctcagttgtacaacgccattggtaaactacttgagcgacataagttccaaatctctaagctgacccctgacgttaacatcttgggcggactggctgagggtcttgaggcttacaactccaaggtgggcgctgatggtctgacagacgactccaaggtgggcgctgatggtctgacagacgacgatacgttcaccctacagtgatatactcaaggtactactatatgtagtgcctttatggatgtcattgcgctacgctaggcgttcctacgtgaaatctgagaaacaacgggaggcattatgctggagttcacaaagagaatcgtcccgtatcttgtggctatcatggtgtttgccttcgggtggcacttgggttcgcaatctacggacgctaaatggaaggaggtagtacagaatgagtacgtttcgaagcaaacagctagagttcaaactcaagcagcacttgacgagatatcggctgagtaccaagcagaccttgaggggctggagggcagcactgataggattattgctgatttgcgtagcgacaataagcggctgcgcgtcaaagtcaaacctaccagtgtccccgcaggaccagacggtcgatgcctcgttgatggttccatcgaactacacgaagcaactgctcgaagtcttatcgcaataacccagaaggctgacctcaaagagaaggccctacaggacacaattcgtaagcttcaagggaaaggaggtgaacattgagtaactctcagcaagccaagaacgccttaatcattacgcaactgaagggtgactttgtcgcctttctcttcgtgctctggaaggccctgaacctgccggaaccaaccaagtgtcaaatcgacatggccaagtgtctggcagacccaaagaacaagaagtttatccttcaggctttccgtggtatcgggaagtcgttcatcacgtgtgcgttcgtagtgtggaccctgtggcgtgaccctcagttaaagatactgattgtctcggcctcaaaggaacgtgcggacgctaactccatcttcatcaagaacatcatcgacttgttgcctttcctgagtgagcttaagcctcgccccggtcagcgtgactccgtgattagcttcgatgtaggccctgccaagccggaccacagcccgtcagttaagtctgtgggtataacgggtcagcttactggtagccgtgccgacatcatcattgcggatgacgtggagattcccggtaactctgcaacccaaggtgctcgtgagaaactctggacgttggttcaggagttcgccgcactgttgaaacctctaccgactagccgtgttatctatctgggtacccctcagaccgagatgacgctctacaaggaacttgaggacaaccgtgggtactccaccattatctggcctgcacagtatccccgctccaaagaggaagacctgtactacggcgaccgtctggctccgatgctccgcagtgagtacgatgaggacaaagatggcctcagtagtcaacctaccgacccggttcgattcgactccatggaccttcaggagcgtgaggtggaatacggcaaggctggatatacgcttcagttcatgctcaaccctaacctcagtgacgccgagaagtaccctctacgactccgtgacgctatcgtatgcggtctacagatggacaaggccccaatgcactaccagtggcttccgaaccgtcagaaccgcaatgaggagcttcctaacgtgggcatgaagggtgacgagatttactccttccatacagcctccagcaacactggtgcgtatcagggtaagattctggtcattgaccccagcggtcgcggtaaggatgagactggctggtgcgtactgtacaccctcaacggttacatctacctgatggacgctggcggtactcgtggttacgaagagaagtcccttgagttcctcgccaagaaagccaaacagtggcaggtgcagacagtggtcttcgagagtaacttcggtgacggtatgttcggtaatgtgttccagcctgtgctcctgaagcatcacccagcgcaactcgaagagattcgtgctcgtggtatgaaagaggcccgcatctgcgatacacttgagcctgtactagcaagccaccgcttggtaatccgtgacgaggtcatccgacaggactaccagacagcacgtgatgcagacggtaagcacgctctgaagtacagcctgttctaccagatgacccgtatgagccgtgagaagggagctgtggcacatgacgaccgacttgatgcgttagcattgggtgtcgagttcctacgctctacgatgcagcaggacgctgtgaagatagaggctgaggtacttcaggagttcttggagcaccacatggagaagcccctgagtaacatctcccagttccgggccaccagtagcaacggtgtggacatccgatgggaagacgacggggatgactctatgttcgtcgcatggtgattatgcagggattgtgcataaggattcattaggccacggaaggccacttttggaaaactctaagtataacagacacttggaattaggtagcactatagggagagacccaaggttacatactataagactacttaaagtttcattcatatagatatgcactttaagtctccttaaaggcagagggtagtgatgataatatcaccctctcactataagacactaagagctaacacaaggaggacctatgcgcttactgttaaccttactgcgccataggactacttggcgatttctgctggtacttgctggtgcccttggggcttcactggttactcagcagcaactcagtggactggagactatcgtgtgctctctactcacttgtagcgattagggtcttcctgacgcgctagggattccgtagtgatgcttatcagcatacaccactccatccctctatagtcaatacttaaagttaaccttaggtgattcactgggtctacctacgggtctatgcaatgacctgaggaatacctgaggttacctttaagaatatgacataaagttctgagtgcatatctcacagtttaaacttttggttatcccccggtaccctctcagttcaccaaaagtaaccataggccaccataaaccttaggtgatacgttgggaatccttaggtgatactatatgttgtggtgtgggagacattgggatactatatgttgacgtctctgtgtccc

SEQ ID NO: 9 - DNA, 41076 bp, Unknown
  source: /note="Description of Unknown: KP3W-P0109 Bacteriophage sequence"
tatctgttggccctctctaagtatccactaagtcacacctgaggagccaacctgaggtaatacctgagaccatataccttaggttaaccatgtgaccatccagcgagtcattactataaggctattcagtggtcagtatcaatacactaaacaattaggtatcactatagggagacactttaagtattactaagagaccatcaccataaagataactatcactataggtctacataaagtttaacttaaggtattgacattcagaatccgttatgagacattagcaaccgttgagagacacaacgtcaccagcaaccagacaataccacgagttatctggttagactgagggtctcaagtagtcatcaaccggacatacgaaagtggttgactcaacgatgaacaagtagtacgatgtatcacagattcacagacatgaagtaccgctacctagtagcatcgctctttaacaatctggtttgtgtcttgataggcttactcacaaaggtgaactattatgactaacgcacaacgtaaacgctatgaagtattacaagagaaacttgctgttgcttatgccgcttggcaagctaacacagacaagagcaaacacgataaactttacagtaaagtggttgcaattaatgctaaaatagataaacttgtgaatagtaccttataagatagttgctggcactagccggcctatcaaggcacaaaccaagctctttaacaatatggattaatcgctgacatgtacatcactcatcacttagtgtttaactagtggttacattcaggtctctggcaaggtacgtcctgtcatcctgagagtaaccacactgataaccactaacatcgaggatatacaccatgattcacacgaaagaaccagccaacaaagtattcgtattcgttaccgcttaccgtggctatgagtcgctcgaagttaacgagaagatgctcaagggtctcattaagaccattcgcacctatccgggagcatacggcaacattcgtgatgagcacgtacaaggctgctttaaagaagctggtatgtctgaggcaacgcaagagcgcacgcttaaggtggaatgtaccatcaagcaagcggctgagctggcgtggctggcgtgcaagacctaccatcaagatgctgtactggtggttaactcacagactcacacggcctctctgtggtctatcgaggacgtaggcgaatatcctcaggtatatccacgcttgaaagaggtgtctttaggtggcacgctgcaacaggttgatgcacctaagggtgaatgctattcagtcatcaacgggcagtactgggaggtggtgtaatgggtaagctgctagcgatatccaaaataacagggcaatgcactgtaacattacgggagtacccacacggtgcaatggggagtacctacattgtgcgatatggtaagaaggtaaaacactgggtcaacgaagtactagctcaggaggattatcaatcatgcgtcgtacatcaatcaacttgcgctgggtggaatgactaatgatcacctactacgtgtacgtcaaccaaatggaatacttcgaagtagatactctggaggaggcgataagactgtgcgactctgtaccgggctcacatgttgaggatagcgtgttagatgaggtgatttatgcaaatagatagtgaggttacagtacacggaatcaccaaagagaagctggagttctaccgcttccgcatggtggcgtgcggtcgctcccacgattacctaatggcccaactggccaaaacctatagaactcgcaaggtgatgtatgctaatcgaatgcaacaatcttgataactttctggataccgtggcgggcctcgttaagcgcggcctcatgttcacctcgaacgcctcagcactgaccataacgttaaccggaggctactgagtgctaaccctatttgtgctcttcgtgtactcgctgatagtcctgtacttccttagggactttcgcaagggtcttaaggtacacagggcaacactaagctactttaagtggggcttcgtgcctcgctttactgtacggctacctaatggccgctttaaggcaaacaaggtaggtattttctacatcgcaacccattgatatcacacttaaggaaacacacaatgaactacaccgacatgcaagaacgcttagacgtcatccataacctgtcaatctgtgaactcgacaagcgccaaccgctattggttgcactcatcgcggaccttgtgaactgtgagacgtccgacggtgacgatacggccagcgattggggtctggaacgtcaggactattggcaaaccttgaagattaaggccaaagacgctgggtttaacctgctgggcaatggtcacttcagcgcagcgtttaagcacgggctgctaccgggtagggtcattaaggttggctttaagaaagaggactcaggggccgcctacgtggctttctgccggatgcaccaaggtcgggtagggattcctaacgtctatcacgtagcgcgtcacgctggctgctatacggtggtactggatgagctggaaccatgccagcgccgagcgaacgatgagcacgaccactacgcagacctcgcttatttctttgtcgagggcgactcggacccagaggagcacgcagaggatgaccagccatttattgagacgtgccagatgattcgcaagttcttctacgggattgcgtcttttgatatgcacagcggaaacatcatgttcaccaaagacggcaagccagtgattaccgacccggtgtcattctcagcggaccgggaccgtgagcctttctcgctggaacctgaggagctacttgcagagattgagcagatagcgcacgacaagatgattgaacgctgtaagcgcaacaaggctaaacgtgacccgaaaggggagctacgcatcgcacgccgtaaggctaataaggaacgtcgagcacgccgtaaggcacacgctaggaggctcaaggagcgtgaacgtgagcgcgagcagtatcacgtagacgccttaaaggcagacatagcgagtattgaagcgcgcgttccggtgtggtgcaggggaccgggactagcgatacaaatgggcaagccgttgccaatcgacaattaccttcagggtagacttatgggttaactaggtgtatcttaggtgtctctcacgcaagaggcaccgatagataaactttattaacgccagttcgctggcaccaaagaggcacacaatgaacgcattaaacattgcacgtaatgacttctcagagattgaactggccgctatcccgtacaatatcctcagcgagcactacggggacaagctggcacgtgaacagctggcacttgagcatgaagcgtacgagctgggcgaacagcgtttcctgaagatgttagaacgtcaggtgaaagctggtgagttcgctgacaacgtggccgctaaaccgctggtcttaacgctgcacccgcagttaaccaagcgtattgacgactggaaggaggagcaagcaaacgctcgcggtaagaagcctcgcgcatactacccgattaagcacggtgtggcctcagagttggccattagtatgggcgctgaggtgctcaacgagaagcgcggagtgtctagtgaggcaatcgcactgttaaccattaaggtagtcttagggacgctcacagacgcctcaaaggctaccatccagcaggtatcctctcagttaggcaaggcccttgaggatgaggcccgcttcggtcgtatccgtgagcaggaagccacctacttcaagaagaacgtagcggaccagctggacaagcgcgtaggccacgtgtacaagaaggctttcatgcaggttgtcgaggccgatatgatttccaaagggatgctgggcggtgacaactggtccagctggaagaccgacgagcagatgcacgtggggaccaaactgctggagttactcattgagggcactggtctggtggagatgaccaagaacaagatggccgatggctccgacgatgtgaccagtatgcagatggtccagctggctccagccttcgtggaactcctgagcaaacgagcgggagcactcgcgggtatcagccctatgcaccaaccgtgcgtagtccctcctaaaccttgggttgaaaccgtaggcggtggctactggtcagtcggtcgtcgcccgctggcgctggttcgtacccactccaagaaggcactgcgccgctacgcagacgtgcacatgcctgaggtatacaaagcggtaaacctcgcgcaaaacacgccgtggaaggtgaacaagaaggtgctggcggtagtcaacgagattgtcaactggaagcattgcccggtgggtgacgtcccggcgattgagcgcgaagagttaccaccacgcccggatgatatcgacaccaacgaggtggcacgcaaggcatggcgcaaggaggccgcagcggtctaccgtaaggacaaggcccgccagtctcgccgtttgtcaatggagttcatggtcgcacaggccaacaagttcgctaaccataaggccatttggttcccgtacaacatggactggcgtgggcgtgtgtacgctgtgagcatgttcaacccacagggtaacgacatgaccaaaggtatgctgacgctggccaaaggtaaaccaatcggtctcgacgggttctactggctgaagattcacggtgcaaactgtgctggtgttgacaaggttcctttccctgagcgcatcaagttcatcgaagagaacgagggcaacattctggcgagcgctgctgacccactgaataacacatggtggacacaacaagattcaccgttctgcttcttagcgttctgcttcgagtacgcaggagttaaacatcacggcctgaattacaactgctcgctgccgctggcgttcgatgggtcctgctctgggattcaacatttcagtgcgatgctccgcgattccatcggtggtcgtgcggttaacctgctgccttccgataccgtgcaggatatctacaagattgttgccgacaaggttaacgaggtgctccagcagcacgttgtcaacgggtcccagacggtggtcgagcagattgccgacaaggagactggggagttccgcgagaaggtaacgctgggtgagtccgtactggctgcgcagtggttgcaatacggcgtgacccgcaaggtgactaagcgttcggtcatgacgttggcgtatggttccaaggagtttggcttccgccagcaagttcttgaggacaccattcagccagctattgacaacggagagggcttgatgtttacgcaccctaaccaagcggctggctacatggcgaagctgatttgggatgctgtgaccgtgaccgtagtggccgctgtcgaggcgatgaactggctgaagtctgccgctaaactgctggccgctgaagtcaaggacaagaagaccaaggaggtactccgcaagcgctgtgcaatccactgggtaacaccagacggcttcccggtgtggcaggaataccacaagcgcgaccaagcgcgcctgaagctgacgtttctgggtcaggccaacgtgttcatgacatacaacaaaggggacaccaaagagattgacgcgcacaagcaagagtcgggcatcgcacctaactttgtgcactcacaggatggtagtcacctgcgtatgaccgtagtgcacgctaacgaggtctacaggattgactccttcgcgctcattcacgactccttcgggaccattccggcagacgctgggaatctctttaaggcagtccgtgagaccatggtaaagacctacgaggataacgatgtgattgcagacttctatgaccagttcgctgaccagctgcacgagtcccagctcgataagatgccagaagttccggccaaaggggacctgaatctgcgcgatatcttagagtctgacttcgcgttcgcctaaggtctccagcaattaggtagcactatagggaaccttcgaacgaccgagggttccgttacttaaagtcttaacttaaagaatacttaaagaggcacgctatgacttactcaatcgttgtaaccatcttgttaatcatcatcacagcactcttcattatcaccatgcgtaatgcaatacgagatggggaacgcttggagcgtaaggtgcaggaggtaagctctcatcttaacaatgagtcagccaaggtgatacgactggcagacaggaccgagtctcttggtagagaggtgcactggttagagggcgaacttgagagcgagaaacagaaggtgcgcgacgtgaacgaactacgtagccgccaacgagaccgcatgaagtttctgcgcaagtcgctagatgacgcacaaaacgagctgctgatggtctccgacctgattcacattaaattcaccgcacgattacctgatggtcagccagtaaagacgctctttaagttaggacttggaccgtgtggtctacacgttaagtccctccgctggaccgagctggaagaccgctatctgatagaccagctgtgcaccaatggcgagcgtaagcagttcgtctactacaagggcgaagtagtaggacgcatcgagttccgccacggtaagtctgaataaggtagcactataggaacatactcaaggtcatcgtattccggtggccttcatgaatgtcccttacgagcacaatcaggagtaacaccatgtaccagaacacaatcaactttgagcgcaaccgtgaacgtcagcagaccgagggttatatccctaagggccgcaagctgaacaagacgaaacgcggtggtggcgtgaagggttccttccgtaacgcgaagggtgacagcgttgttaaccaagagaaatacttcgtaggagcgtaacaaatggctgagcaaactaaatggctgttcgacgggagcacatcacagtggtcacgactaggctacacagagcgccgactttttgaagacactgggttgacggtcattatgactcaagactggagcacacaaggtgttacactctcggtgcacgagccgcgcctctatggtggtcaatgcctagtagagaagaccttcagtcgatggtcaattgactcagcgtcagactggctggcaaaactcatagccgactactcaagttggaaatgattaggtagcactataggcagactcaaggtcatcggattccggtgtcctttatgactgcttattgcatactaaatgaacactacacttcggagacatcatcatgatgaacattaagactaatccatataaggccgtttcatacgtacgctctgctatcgagaaggcgctggagacttccggttatctcatcgcagacactaagcacgatggtgttcgcgggaacatttgcgtagacaatacagccaacgcagcatggctcagccgggtctccaagaccattccggcccttgagcacctcaatggtttcgaccagcgctggcagaagttgctgaaagatgaccgctggatttttccagatggcttcatgcttgatggcgaactaatggtcaaaggcgtggacttcaacacggggtctggccttctacgtaccaagtggaccaagtgtggtaacttcgattaccatacagacccgatggccccgctgaaggttccgtttgaactcgacactaagcatcttcaagtcgtcctctacgatatcattccgcttgacattatcgagtccggtgatgattacaacgtgatgaccctcctccgccttgagcacgtcaaggttgccttaccagttctgcaagaccacttccctgaagtcgagtggtgcctctcggagtcccatgaagtttatgacatggacgaactcgatgcgctttaccggcagaaacgcgaagaaggtcacgaaggtctggtggttaaggaccctcgcggtatctataagcgcggtaagaagtccggctggtggaagctgaagccagagaacgaggctgacggtgtcgttgtgggactaaactggggaactcccggtcttgccaacgagggcaaggtgattggcttcgaggtcctccttgagtctggccgagtagtgtccgctaacaacatctctcaggcacttatggaagagttcacacgagccgtggaggccacagcagaccatcatgaaggttcctacactaacccttacgatggctgggcgtgccaaatcaagtacatggaggaaactccagatggctctctgcgccacccgtcgttcgataaatggcgtggaacagaggaagaccctaccgtcaagatgtaattatggagcactataggagacaacaatatgtccatcaatctgattctaatcatcgtgttcatcctcgcggctatcgtgtggtcaatgaacgacgaaccaccatatagcggaggctaaaccatgcgcttacacttcaacaaatccaacggtatcttctcggttcgccgggaggaccgcagcactgtagcagccactgagcgccacggtaagattccacgtatcggcgacaccttcgagctggcacccagtgtgcacatcttggttactcgcggtctctacgaattggctcagacaaagagccgtcctttcgtacccgttgtggtaaccaagtggccacgccttcgcctgttctgggagcgcatcaaggaggtcgtaaatgactgaggtagcagtgtcaaccttctgtgaggcctgcgcgtttgatgatgaccgttatcctcacacctgtaagccaaaggtggcacagtcaggaactatctgcacagcctgtggcacccgtgacgagaaccacgtgaaatcctgcccgaaccgcctagacaaaaagtctgacgctgtgaaggctccgagtcattaccagctgttcgacggtactgagtctatcgaagtgattgcccgtgcgatgaccataagcgagttccgtgggttctgctttggtaacgtcctgaagtaccgcctgcgggcaggaaagaagtcggaccttgcgaacatggagcaggaccttaacaaggcagcattctatcaggagctgtttgataaacacaagggtctatgctatgacgccaagtgactggtgccgagcgatgtacgagaagacgctcgaccctgcgtacatcaccctgtataacatgtggaaggagcgagaagatgcaaaagttcgtcgtaacggtcgagacagctaacgcatcgtatgaactcccggtacacgctgggtctcttgaggaggccctcgaagttgccgaggcggagtacgaagagttaggccaagtgactcgggtacgcccagatagtcattaggtagcactatagggacacaggttgtccctcttactgtttaaacttaaaggagattcatcatggcattcgctaagaagaagatttataccaccaagattggtacctgtgagccgtatgcttacttcaacaagccggactatggcggtgagggttttgagaacccacgcggtacctacaaaggttccgtaacgttcaagaacgaagactgtcaggagctggtagacctcatcgttaagacccatgaggaaaactacgcggcacgtctggaagcgcatgaagcgaaccctcctaagtttcagaagggtaagaaacccctgaagccgtacgaaggcgacatgccgttcttcgacaattgtgatggcaccaccacgttcaacttcaagtgctacggttcgtacgaggacaagaagactggcgagaccaagaagattgttctgggtgtagtagacgctaaaggaaagcgcatccaagacgttccgatcatcggtggtggttccaaagtgaagattcgcttctcgctggtaccttacggctggtctgcggtagctggtgcttccgttaaattgcagctggaaggcgttatgctggtcgaactggctacctttggtggtggcgaagacgactgggctgacgaagccgtagaaggcggttacgaagctgacgaatctcgcagccgtaaacctcaggaagacccggaagactggtctggcgaggaagctgacgagggtgaagctgaagaagacgatgacttctaatggctggctatggggccaaagggattaggaaggtgggtgccttccggtctggccttgaggacaaggtgtccaagcagttagaatcaaagggcgtcacgttcgactacgaattgtggcgcatcccttacgttattcctgcgagtgaccacctttacactccagacttcttgctgcctaacggtatcttcgtggagactaagggtctctgggaagccgaggaccgcaagaagcacctattgattcgtgagcagtacccggagttagacatccggttagtattctcttcgagtcgcactaagatttacaaagggtcgcccaccagttacgctgagtggtgcgagaagcataacatcttgtttgccgacaaattgattcccgtagactggctgaaggagccgaagcgtgatgtaccgttcggcaagttcaagcagaagaaaggagcaaagtaagtatggctaaggttcaattcactaagcgacaggagacctctcagattttcgtgcactgttctgccactaaggcaaccatggacattggtgtccgtgagattcgccagtggcacaaagagcaggggtggctggacgttggctaccacttcatcatccgccgtgatggtaccgtagaggcgggccgtgaccaagatgctgtaggttcacacgtcaagggctacaactcgacttcggtcggtgtgtgtctggttggtggcatcgacgctaagggtaaccctgaagcaaacttcacgccagcccagatgcagtctctgcgctcactgctggtagaactgaaggtgcaatactccggggcagtgttgatggcacaccacgatgtagcaccgaaggcttgccctagcttcgacctgaagcgctggtgggagaagaacgaattggtcacttctgaccgtgggtaaacattaggtagcactacagggagacaattgcgtttccctgttgtcgcttgaggagattactttatgaacaagttcaaagagcacttcgacccaatcccattcctagcgtacgggctgttaggcttgtgggcgctatccttcgtggtctcatttatcgcatcatgcatcaacggtacctcgttatgagttacggagactctcaagaagatgggcaggagagtatcttcctgttccacgctccgtgcgaaaactgtggttcttctgatggtaactcagtgtactctgacgggcacgagtactgcttcgtgtgtcaacaccgggttcccggctcagaggaacgtaccgaaaagttatcatcgagaagacccaaaggagggaattacgggatgaatacacaaggttcaggcttattggtattcggcgagaatgatggtcggtacactgacctgacggctcgtggtatctcaaaggcgacatgccagaaggctggctattgggtcgccaaggtcagagggactgcctatcaggtggccgactatcgtgaccagaatggctccatcgtctctcagaagctgagggacaaggagaagaacttctctaccagagggtctcacaaaggggatgcactgttcggtaagcacctatggaatggtggcaagaagattgtcatcaccgagggtgaaatcgacatgttaaccgttatgcaacttcaggactgtaagtggcctgtggtttctctcggtcacggtgcgtcagccgcaaagaaaacttgtagcgcaaactatgagtatttcgatagcttcgaccagattatcctgatgttcgatatggatgatcccggtcgtgcagccattgaggaagctgctcaggttctccctcccggtaaggtacacgtagcggtactgaccgagaaggatgccaacgagtgtttactcaagggcaagggcaaggaggttctcgaccagatatggaacgcggccccttgggtgccagatggtgtaattggtgctatgtccatgaaggaccgggtgcgagaggccatgaccagcgaacagagcgtgggataccttttctcgggatgtccgggactgaacgaccgaaccttgggtgcacgtggtggcgaagtcatcatggtcacttctgggtcaggaatgggtaagtctacgttcgttcgccagcaggccctagggttcgccagagggcaaggactgcgagttggtatggcgatgcttgaggagtccgtagaggagacgatggaggatgttctagggattgctaacggaatccgcttacggcagcaacctcgggagttcaagcagaaactgatagaggacgggacgtatgacaaatggttcgatgagttgtatggcaccgaccagttccatctctacgactcctttgcggaagctgaggtggaccgcctgctggccaagctacactacatgcgcacagggttaaactgtgacgtaatcattatggaccacatctcaatcgtagtgtctgcctcagaggaatccgatgagcgcaagatgattgaccgactcatgaccaagctgaaggggttcgctaagtcaaccggagtggtacttattgttatttgccacctgaagaacccggagaaaggtaaagctcatgaagaaggacgtgctgtttccattactgacctgcgtgggtctgggtctcttcgccagctctctgatactatcattgcacttgaacgtaatcagcaaggggatatgcctaatcttgtcctccttcgtattctcaagtgtcgctttaatggtattggcgttggcattgcgggatacatggagtacaacgaaaagacaggactccttgaaccgtctagctacactggcggagaaggagagggagatactggctgggaaggccacgaagaagacgactactgagtcagactggaagttaacaacacaatgtaattgcccatgggataggccgtgtgtctgtcctgaccgggcttaatcaacctgaggagaaccatcatgtttaaacttatcgaaacattaggccgtctggtcatcgcgctgtatatccgtgaagccaaggcgctgaacaaatcgtccaaggtggaagcagaagcagccgctaagctggctaaagcagcagacaaggcacgtcaggcatctctggatgcaacagcagaggcagcgaaagttgcacttaaagcccagaaacttaaggagttcttctaacccatggatatttacgtgctagtcggtatgcttattggcatcctgctcatacacctatcaacataaggagttcttctaatgactaccaaagctaaattccccggcaataccattcagctgtcagacactgtagaccagtggggtcgcaaggttcacatcaacgttcgcaacgacaaggtgactctggtctaccgctggaagtctaagagcgataaccgtgcgcacactcagcgcgttaccctcgacgatgttcaggcagctcgactgctggcatccgtagccgttcaggcagctcgactgctggcatccgtagccgtagcggcgactgtggctgtgggtgaagacaaggtgcgtgaggttatcctgagtaaagaggtaggctcaacagtaacccgactggctgaagcgtcagaagctaagtgataaactcaaggtcattactatatgtagtggcctttatgattatcacacacaacatattgagaggacataaccatgcgtaaacctgaagaaatccgtgcagacatcgagaagctgaccaaagagctggctgccgccaagacctatgaggccaagcgtgacgctgccgtccacattcttgagaaccttgggtggacccacagtggcctcaagggctggcagaaacctgcgccaaagtggagtgactataaggctccattgaaggctggcgagcttgcaatttgggaggagggggacattggcggtacagtctacatacgcagtgtgggcaataagtatgctcaggtgtcccacgttcgtggtgttagtagattgggagctgatgtactgaacagtagctttgctgtagagaagagtaagttaaccgtgcgtcctcgtgagtatttcattgggcgtcgttaagtaacaggagaccactatgttagtatccgatatcgaggcgaacaacctcttagagaaagtcactcagttccactgtggggtaatctatgactacagtacggacgagtacgtatcgtatcgaccttgggacttctcagcgtatctcgatgcgttagaagccgaggtggctcgtggtggtctcatcgtattccacaacggtcacaagtacgatgccccagtgttaaccaagctggccaagctccaattaaaccgagagttccacctgccgcgtgagaacgtagtggacacgttggtgctcagtcgcctgctgtttgcgaacatcaaagattccgacatggccctgctgcgttccggtaagttacccggtaagcgcttcgggtctcacgctctggaggcgtggggttaccgcttaggcgagatgaagggtgagtacaaggatgacttcaagaagctccttgaggaacagggagaggactatgtggacggtgctgagtggattagcttcaacgagccgatgatggactataacgttcaggacgttgtggtgaccaaggcgctcttagagaagttgctgagtgacaagcactacttcccggatgacgttaactttaccgattgctgtactgatgccttttggtatgattcctgcgaggccgtctggctggagcacagagctgcgtggttgctcgctaagcaggagcgtaacggcttcccgttcaacaccaaggccatcgaggaactctacgttgaacttgctggtcgtcgttctgaactccttcagacactcaccgacactttcggaacttggtaccaacctaagggcggcactgagttattcctgcaccctcgcaccgggaagcctcttggtaaatacccacgagtgaagtacccgaaacagggtggtatctacaagaaacccaagaacaaagctcagcgtgagggtcgtgaaccctgtgagctggacactcgggattacgtagagggtgctccgtacacaccagtagagcacgttgtgtttaacccaagtagccgagaccacattgcactcaagctgaaggaagccggatggatacctacagagttcaccgataaaggtgcgcctaaggttgacgatgaggtccttgagcatgtgcgtgtggacgaccctgagaagcagcgctgtattgacctcatcaaagagtacctgatgatacagaagcgcataggtcaggcagctgagggtgacaaagcgtggctacgttacgttcaagaggatggtaaaatacatggttcagtcaatcctaatggtgccgttacgggccgagcgactcacagcttcccgaacctcgggcaagtaccgggtgttcgaagtccttacggcgagccttgcagggctgcttttggtgctgagcatcaccttgatggcctcactggtttaccttgggtacaagctggcatcgacgcaagtggtctggagctgcggtgtctcgcccacttcatgtccaagtacgacgggggagcttatgcagatgttattcttaacggggacatccacacagtaaaccagcaggctgctgagctgcctacacgcgataacgccaagacattcatctacggcttcctctatggtgctggtgatgaaaagattggacaaatcgttggagcaggtaaggaacgcggaaaggaactcaagaagaaattccttgagaacaccccagcaatcgcagccctgcgcgaaggaatccagcagaccctagtcgagtcatccagatgggttgccggagagcagaaagtcaagtggaaacgtcgttggattaagggactcgatggacgtaaggtacacgtacggtcaccacatgctgcactcaacaccctccttcagtcagcgggcgcgctcatttgtaagctctggattgtcgagactgaagagttacttctcaaagctggattaaagcacggttggggtggtgattttgcgtacatggcgtgggttcacgatgaaatacaagtggcctgccgtaccccagagattgcacagcaggtgattgacattgcacaacaagcgatgcgtaacgttggggaacactttaagttccgatgccgtctggatacagaaggtaagatgggtccgaactgggccgtatgtcactaatactatacaggagatttatcatggctatgactaaacgtgtgcgcgtaacatttgactctaagtttgtagcaggtacgaatgatatcaacgagttcgctaagacacttgtgagctactctaagcgcttcatggagggtgatagtaccctaaaaggcgaccagctggctcttgcagagatggcggcgaaggaaggcgtagaggctgctgtggaactgtctatcaaaatgtcctactcaaaagctatcaagagtgaactagctgacgactgcgtgacagtctccaacattcgaatggagattaaacagtgagcgagtacctaaaagttctggcggccctcaagggctgcccaaagtccttccagtcgaactacgtgcgtaacaacgctgcgttagtcgctgaggctgcgagccgtggtcacatttcgtgtctgaccatgagtggccgtaacggtggcgcttgggaaattaccagtgccggagtgaaattccttaagactcatggaggttgcttatgaaagacttcttaggaaatactatagagattggggacaccattgtctacgcagacactggaggtcggggtggctcatctactctgtacaaaaccgttgtcactaagatgactgagaagcaggtgttggtcgccgaatcttcgtggtcaaaactgtggcgtccgttcaaccgggtcgtggttgttgccaaaggaggttgcctgtgagaaagagaatggtgttcgtgcacccgttggaacctaaatcacactgggaaactgctgatggcatcgtctggttttataaggaaggccacatgctgcgacagtcccatgtcacccacaaggaccttcacgacccggagatgggctttaagttcaaggagttaaagaatgagtaagcacacattgttatccttcagtgactaccgggcaacccagaagattgccaagggtgttcttgtgatggatggtgactggctggtattccaagccatgagtgccgctgagttcgatgcctcgtgggaggaggagatttggcaccgttgttgtgaccacgctaaggccagagagattctggagaactccattgaatcctacaagggccgtaagaaggcgtggaagaatgccgacgttgtcctagcgttcaccgaccgagccaactggcgcaagcttctggttgacccaacgtacaaagagaaccgagctgtaaccaagaagcctgtgggttacttcgagttcttagaggctgtctttgcgacctacacgtgcgtacttgagcctcagctcgaaggagatgacgtgatgggtatcatcgggtctaaccctctcgtgtacaactacgagaaggccgtgctggtctcctgtgacaaggactttaagactatcccggattgcgacttcctgtggtgtacgactggtaacatcctcgtacagactcaggagacagccgactactggcatctcttccagactatcaagggtgacatcaccgatggttacggcgggattcccggatggggcgataccgctgaggacttcctcaaggaaccattcattgtggagcctgtaacgtccgtactgaagtccggtaagaacaagggccaagaggttaccaagtgggtgaagcgcgctcctgagtcgggagagacgctctgggactgcattaagtccattggggccaaagcagggatgaccgaagcggaagtaattaagcagggccagatggctcgcatcctccgttctgatgagtacaacatcgagactggggagattactctatggcaaccgggcagctgattcttatcgtcctgaccatgggcttaattgctcgtggtctctggatgttggccttgattatcaagcagatagtcgagcacaaagcagagtgataaactcatgggcactaattaggtagcactatagggaagtgcccattatgattattacttaaagattacttaaagaggagactcaaatgttaaaacctatagagcacatccttaacaatcctaatgaccttcctgacgtaccgcgagctgttaaggagtacctacagtctcgcttcaatgctgacttcctgtatcaatcagaggtccgtaagctgcgtgaggctggtcacagtgaggagttcatctccggggtactgtatggtcaccacatggcttcgcgtgtccttgatgagatggagggccgtcagcgcgcactcaaagaaggagattgattatgtgtttctcacctaagatgaaagcacctaaggttgacacaacgactgtccctgagccagctccgctaaccgaggaacctaagggtgtccagtatggtggcgacgaagactcaaacagcaccactcctgaggtgtcaggtcgtaagtcactcaaggtgaccaagactaccgagcctacagggtccgtcagtaaaatccgtaagtcagctttaggaggctaacatgggactgttcaagaaaatcaagaaggctatctccaaggtagccaaagcgccactcaaggccgtgggtctggcagcagatgcacctaacgtgcagacagccgctgagacacctgtagccgcacctcaggaagcaccgaaagaggtcgtggaggacgttgagtcttcggcagacactgagtccggcaagaagaaaactcgcgcctccggtaagaagtccctctcagtttcccgcagctcaggcggtgggattaacttatgattggttacggggagggctaacaaatggcagaagttaaactcgaaggcttcgcagaggagggagccaaggcggtatacgaccgtctgaagaacgaccgacaaccttatgagacacgagcagagtcctgcgctcagtacacgattccctcactgttccctaaggactccgataacgcctcaaccgattatacgactccgtggcaatcagtaggtgcacgtggcctgaacaacctagcgtccaagctgatgctggccctgttcccgatgcagtcatggatgaagttgaccattagtgaatacgaagcgaagaaccttctgggtgacgccgagggtctcgctaaggtcgatgagggcctctcaatggtggagcgcatcatcatgaactacatcgagtccaacagttaccgagttactctctttgagtgcttgaagcaactgtgtgtggccgggaacgcgctgctatacttaccggagcctgagggttatacccctatgaagctctatcgactgaattcatatgtggtacagcgagacgctttcggtaacgtactccagattgtcaccctagacaagattgcgtttaacgctctccctgaggatgtccgcagccaagtggaagcagcccaaggtgagcagaaggaagacgctgagattgacatctacacccacgtgtatctgaacgaagccggggatggttactcgaagtacgaagaggttgccgaagaggtagtaccgggcagcgaagctgagtaccctctcgaagagtgtccatacattccggtccgtatggtccgcatcgacggtgaatcctacggacgttcctacgtggaagagtatctgggagacctcaagtccctagagaacctccaagagtctatcgtgaagatggccatgattaccgccaaggttatcggtctggtagacccagcaggtatcactcaggtccgcagactcacggcagcacagtctggtgcgttcgtaccgggccgtaagcaggacattgagttcctccaattggagaagtccggtgactttaccgtagcgaagaacgtaagcgacaccattgaggctcgcctctcgtatgcctttatgctcaacagtgcggtacaacgtacaggcgagcgagtcacagccgaagagattcggtacgtggcgtcagagctggaagatacccttggcggtgtctactcgattctctcgcaggaactccagctgcctctggtaagagtgctcttgaagcaactacaagccacgcagcaaatcccggagttacctaaagaggctgtcgagccaactatcagcactggccttgaggctatcggacgcggtcaggaccttgacaagctggagcggtgcattaacgcatggtctgcccttaaggctctcgaaggtgatgatgacctcaacttggctaacctcaagttgcgaattgctaacgctatcggactcgacacagctggtatgctgctcactcaggaagagaagaacgcccttatggcacagcaaggtgctcagattgctacacagcaaggggccgcagcattgggtcagggtatggctgctcaggctactgcaagtcctgaggcgatggcagctgctgctgattccgtaggtatgcagccgggtatgtaattaggtagcactatagggagaccgattggtttcccctcttagtcttaactttaaggagattgaaatggctggcgaatctaacgcagacgtatatgcatccttcggtgtcaacagtgctgtgctgactggtagtacacctgaggagcaccaagaaaacatgttggctcttgatgttgctgcccgtgatggcgatgatgcaatcgagctgaacaccaacagtgatgacccatatggctccgatgtggacccgttcggtgaacctgaagagggccgtatgcaggtccgcatctcagctgacggttccgacgaagagtctaccgaaggtgaagagggttctgaagaagaacagcagggcgacgaagggagtcagccggaggaagtaaccgacgatggcgaacaagaagagttcaaaccgattggtgaaactccggctgacataaacgaagcctctcagcagctggaagaacacgaagctggctttaacgatatggttgccactgcaatcgaacgcggtctctcacaggatgctgtgacccgtattcagcaggaataccagaacgaagacagtttgtccgatgagtcctaccgagagttggccgaggctggctacagtaaggcgttcgtcgatgcgtacattcgtggtcaggaagctctggtcaaccagtacgtcgagaaagtgatggacttcgttggtggccgcgagcgcttccagcaggtctacggccacatgaagaccaacaaccctgagggtgctgaggcactcatcaaggcttttgaatcccgtgacgtagccaccatgaagacgattctgaacctagcgggacagtctcgtgataaaacctttggtaagaaagctgagcgcactattaccaagcgtgcaaccccagcgaaacctgcggccagtaaggctgaaggcttcgagtctcaagctgagatgattaaagctatgtctgacccgcgttaccgcaccgactccaagtatcgtcgtgaagtggaacagaaggttatcgactctaagttttaattaggtagcactatagggagactccagcgtcgatgaaaggctgggacttctcccttcgagttacacaatgagtatcacctcgtttcaagtagtacctcaaaacatttcgtataaacaacataaggagattcaacatggctaacatgcaaggtggacagcagctcggtactaaccaaggtaaaggtcaatccgcagcagacaagctggcgctattcctgaaagtattcggcggtgaagtcctgaccgctttcgcccgtacctctgtgaccaccaaccgtcacatgcagcgtcaaatcagctccggtaagtccgcacagttccctgtgattggtcgcaccaaggctgcttacctgcaaccgggcgagtctctggatgacaaacgcaaagacatcaagcacaccgagaagaccattaacattgatggcctgctgactgcggacgtgctgatttacgacatcgaagacgcgatgaaccactatgacgtgcgctccgagtacacctctcagattggtgaatctctggcgatggcagctgatggtgcagttctggctgagctggctggtctggttaacctcgctgattccgtcaacgagaacatcgctggtctgggcaaaccgtccctgctggaagttggtgctaaggctgacctgaccgacccggttaaactgggccaagcggttatcgcacagctgaccattgctcgtgcggctctgaccaagaactacgtcccggctaacgaccgtacgttctacaccactcctgacgtgtactctgcgattctggctgctctgatgcctaacgctgcgaactatgcggctctgatcgaccctgagcgtggttctatccgtaacgtgatgggcttcgaagtcgtcgaggttccgcacctgaccgctggtggtgctggtgatgaccgcccagacgaaggcgcagatgcgaccaaccagaagcacgccttcccggcaactggcggtaaagtcaacaaagagaacgttgtaggcctgttccagcaccgttccgctgttggtactgtcaagctgaaagacctcgctctggaacgtgctcgccgcgctgagtatcaggctgaccagattatcgctaagtacgcgatgggtcacggtggtctgcgccctgagtctgcgggtgcgctggttttcacggcggcctaagcgtaaatacctttagtgctcgggtggtaactccacctgagtacgaggtacagactgtagccattgatggtgattcacttaaggtggcactctatgggctggagagtgtaacggactggtcaacccttgaggtaacttatggtacttcaggtattgccagccacactcgccggaccaacacgctgtacttcaaaggaatcgctgtgggcgaaactctagtgactgtcagctttgacggttccgaaaggaagtcctttaagctggtcgtgactaattaaaactaagccaaaccccttggggaccactcacggtctctgaggggttttttcgttaggagcttacattatgaacatgcaagatgcttactttgggtctgccgctgagctggatgccatcaacgagatgctcgcagccatcggtgaatccccggtgacaacccttgacgaagatggtagcgcagacgtagcgaacgctcgtcgtatcctcaacaggattaaccgccagattcagtctaaaggatgggcattcaatattaatgagtcagcaacattgaccccggatgccagcactggactcattccgttccgtccggcctacctgtcaatccttggtggccagtacgttaaccgtggaggttgggtgtacgataagtcaaccgacactgacaccttctcaggaccaattaccgtgaccttgattacccttcaggattacgacgagatgcctgaatgtttccgccagtggattgtcaccaaggccagccgccagttcaactctcggttcttcggagcggaggacgtagagaactcactggcacaggaagagatggaagcacggatggcgtgcaatgagtacgagatggacttcgggcagtacaacatgctcgatggggatgcattcgtacagggtctcatcggtcgttaatcagaaacttaaggaggaccaaatggctctcgtatcgcaatcaataaaaaatcttaagggaggcattagccagcagcctgaaatcttacggtatcctgagcagggtacacttcaggtcaacggttggtcctccgagactgagggtctccagaagcggccacctatggtgttcatcaagtcattgggtggccgtgggtatcttggggaagacccctacatccacctcatcaaccgggatgaatacgagcagtattatgctgtgttcacagggaatgacgttcgggtattcgacctatccggctatgagtatcaggtccgaggtgatcgctcttacgtgacagtaaacaaccctaaggataacttgcggatggtcaccgtggccgactacacgttcatcgtgaaccgtaccagacaggtccgggatagtcataacctgaccaacggtggcaccttcagagataacgtggacgccctcattaacgttcgcggtggtcagtatgggcgtaagctcgaagtgaacattaacggcgtgtgggtaagccaccagctccctccgggtgacaacgctaaggatgacccgcccaaggtggacgcacaggccatcgctgaggccatcacggttcttctacgcgcagcgcaccctacgtggacgttcaatgtcggaacagggttcatccactgcatcgctccagcaggtgccaccattgacatactggagactaaggatgggtacgccgaccagttaatcaatccggttactcactacgtccagagcttctctaagttacctctgaacgcaccagatgggtacatggtgaagattgtcggggacacatccaagaccgccgaccagtattacgttaagtatgacaagagtcagaaggtctggaaggaaactgttggatggaacatctcgatagggctggattacaccactatgccttggacactggttcgcgcagccgatggtaactttgacctcgggtatcatgaatggaaggaccgacgcgctggtgatgacgataccaaccctcaaccatcctttgtgaactcaacgataaccgacgtgttcttcttcaggaaccgattagggttcatctctggggagaacattgtgatgtcccgtaccagtaaatacttcgagttctacccgccgtcagtggccaactacacggacgatgacccgctggatgttgctgtgagtcataaccgagtgtcggtcctcaagtatgctgtgagcttcgctgaggagcttctgctgtggtctgatgaggcacagttcgtcctgtcagccaacggggtgttatccgctaagacagcacagctggacctgaccacccagttcgacgtgtcagaccgtgcgcgtccttacggtatcggtaggaacatctactatgcgtctcctcgcagctcctttacgtccatcatgcgctactacgcggtgcaggatgtaagctctgtgaagaacgcagaggacatgacggctcacgtaccgaactacatcccgaacggtgtctatagcatcaacgggtctggtacggagaacttcgcgtgtgtactgaccaaaggtgcccctagtaaggtgttcatctacaagttcctctacatggatgagaacatccggcagcagtcatggtcgcactgggacttcggtgatggtgtggagatgatggccgcaaactgcatcaactcgacgatgtacatactgatgcggaatgcctacaacgtgtggatagctgcggtggactttaagaagaactctacggactttccgttcgagccttacaggttccacgtggacgccaagcggtcatatcacatctcagagactgcgtatgatattgagacgaaccagacggtagtgaacatcaaggacatctacggtgcgtcgttctctaatggtaccgtggcaatctgcgagagtgacggtaaaatcaccgagtacgagcctacgggttcctcttgggattcaaccccggacatccacattagcggtgacatctccggtaaggacattgtcatcgggttcctgtatgacttccagtatgtgttcagtcggttcctcatcaagcaggagcagaacgacggcacaacgtccactgaggactctggtcgcctacagctgcgcagagcgtgggtgaactatcaggacactggtgcgttcactgtgagtgtcgagaatggcaaccgtgagttcaactatctggtcaacgccaaagtaggctctacgggtctacgtctgggccagaaggccacgactactggtcagtatcgtttcccggttacaggtaacgcactgtatcagaaggtttccttgagttccttcaacgcttccccggtgtcaatcattgggtgcggctgggagggtaactacatgagacgcgctaacggtatttaactgaacgtctccctgtagtgccactcaattaggtagcactatagggagaccacactaagaggggacttaaagcatgtacataagaaacactgcaagtaatgacttcgagttattcatcccggcctaccatgacgtacttgaggcgcaggccatgggtatagaaccatcgttcccagcggttactgagtgtgtcacgttagaccacgatggttttcctttggctataggtggacactgcggagaccagtgctggttcgtcacgagcgaccaagtgtggagactcgacagggctggtaagctggagttccgtgagagaatcatggagtacagggacatgttattaaatgtttatccatccctgtggaacttcgtgtgggtcggcaacggtccccacaagcggttccttaagtccatcggtgctgtattccacgaggagtacactcagggtgggaagttccaactgttcaccataacgaggaggtaattatgtgctggatggcagctattcctattgcaatgacagcagtacaagccatcggtcagtcgcgcagcgaagccaagatgattggtcttcagaatgaccagatgcgccgacagtctgcccaaatgattaaagagtcaaacattcagaacgctaacgccagccttgagcagaagcagaagctggaagaagccagtgcggacctgaccgctaagaatctcgataaggttcaggccatgggcacaatccgtgcagcaatcggagagggaaaccttgagggtgccagcatggaccgtatcagtcgaatcgaggagggcaagttcattcgggaggccaacgcggtcaccgataactaccgccgagactatgcgtcactgttcgcccagcagctgggtaactccgagtcaactattgaccaagttaagtccatgcagaaggctgagggcaaaggtaagtccaaactggaacaggtgctggacccgctggccttaatgggttcgcagggtgcctcagcgtatgcttccggtgcgttcgatagcaagggcaccaaggcaccaataagtaaggcccaaggtactaaggtaggaggtaagtaatggccagtaaattagaacaagcattaagccaactcccacaggccgggtctacccgaatccgtggcggctcagcgtccatgcagtatcgcccggtgaccatccaacaggaaggtgccagacagtccaacctagtgcagtccttggcgaagtttgggacagcagtaggagaagcagcggacgcatacgacaagcgccagcgagacaaggctgacgagcggtccgatgagattatccgtaagttgaccccagagcaacgtcgtgcggccatccagaatgggaccctgctgtatcaggatgacccgtacgctatggaggccctgcggttcaagactggccgtaacgctgcgttcctcatagacgacgaagtggcacagaaggttcagaacggtgagttccgcactcgtaccgagatggaagagtacagacacaagcggttgaccgaaggtgccaacgagtacgctgagcagttcatgattaaccctgaggactctgagttccagagagggttcaatgcgaacatcaccgagcgtaacatctcactgtatggtaagcacgatacattcctgagcgaacaggcacagaagggtgccatactggcctcgaaggtggagctgtcaggcgtgcttaaagaccctgccgttcttgcccgtccagagtccggtgagttcttccagcgctacatcgacaacgcgattaagaccgggagtatccctagcgacgctcaggcacaacaggtcatcatcgggtccctcaacgacgtcatccagcgtccgggtgcgaccaacttcttgcagagccttgagggccgtccggtcacccttaacgggaagaccacgacctacaaggaacttatgggagaggagcagtggaatgccctgatggtcaaggcccagtcaacccagttcgacaatgacgctaagttgtccgaaggtttccgccttgggatcaccagtgcgttgaaccaagacgacaccagcaagggctgggagatgcttcagggtgccaaggcagaactggatcgtctgcaacccggtgaacagatgacacccgagcgtgagcgcctgattcaagctgaggaacagatgcaggcccgtttccgtcaggaggcccaagcggtagccaaggagatggacaagcgtcaaaagaccattaacaagaatcaggtcatcgaccagcagttcaccaaacgcatcaacgggcagtatgtgtccaccagctacaaggacatgccgaccaacgagaacactggcgagttcactcacagtgacatggtgaattacgctaacgggaagctggctgagattgaccagatgcagctcacggagcaacagaaggaccgcatgaagctgagctacctacgggcagactcagagggtggagccttccgtaccgttgtaggccagatggtcaccgacgctgggtctgaatggtctgccgctgtgattaacggtaagttgccagaggacaccacggcgttgaacaagctgcgcaccatgcgtaacaccgacccggacctcttcgctgcactgtacccggataaggctgacttgtttctgatgatggacatgatggacaagcagggtattgacccgcagattcttatcgacgctgaccgttcccgccgcagtctcaccaaggagatgcagtatgaggatgataaggcgtgggcgtccctgaagaacaactcagagtccccagaactgtcccgtatcccagcaagtctggatggtatggcccgtaagatttatgacagcttcaagtaccgcacaggtaacagtgatggtgccatgcagcaggtcgataagttcctcaaggaatccactgtgaccttcaaaggtgatgacatggacggtgataccattggtattatcccgaagaacatcctacaggtcagtgatgaccctaagagctgggagcaaggccgagacattctcgaagaagcccgtaagggaatcattgcggctaacccttgggtgacaaacaagcagctgacgatgtaccagcagggtgactctatctacatgatggacaccactgggactgttcgcatccgctatgataaggagctactgactcgaacctatcaggaacagcagcagcgactggccaaggaagccgaagagaaggcactgaaggaagcaaccaagcgtgcacctatctccgcagccactcaggcccgtaaggcagctggtgagcgcgtacgtgcgaaacgtaaagccactccgaagttcatttatggaggtggcgatgagtaaacaataaggagacaacatgagctacgacaagtccaaacctagtgactacgacggtatgttccagaaggcagcagacgcacacggtgttagttacgacctactgcgtaaactgtccttcaacgaatcatccttcaaccctaaggccgtctctaagactggccctaagggcatcatgcagttcaccaaagcgacggcccggagcatgggccttaacgtgaccgatggtgacgacgatgggcgctacaaccctgagttagccattgacgctggcgctaagctgcttgccagtctcgttaagaagtacgatggtgatgagctgaaagcggccctagcgtacaaccaaggggaaggcccagcgggtgcccctcagctccaagcgtacgacaatggagacttcaggtctatctcggaggaaggtcgtaactacatgcgcaagctgctggatgtggccaagagtccgaactcaggcgcactggaggcgttcggtggtatcaccccaaagggtaaagggattcccgcagaggatgccttcaagggcattgctaagactggtaaggtaggtactacgctgccggagtcccatgggttcgacgtagagggtgtggagcaacctgcacccaacgtaccgtacgccaaggacttctgggagaagaccggaacgactcttgatgagtacaacgctcggtctaccttctttggcttcggtgacgctgctgaggctcaacttcagaactcaaccttgggtgtggccttccgtgctgcgcgtgctgatgatgggtacgatgtgttcaaagacacgatgaccccgactcgctggaactcttacgtcccgtccaaggaggacttacagaagctgcgggactccgggttacccccgagttactacggtgtggtgactggtggtgacggtgagaactgggatgcgctaattaagctggcaaaggataacttcgaggctgaccaacgggccgctgaggctggtactggcgcgaaactcgctgctggtatcgtcggtgctggtgtagacccactcagttatgtacctctggtcggtgtagctgggaagggactcaaggtggtcaataaggccctgcgagtaggtgcacaggctggggcactaagtgttgcctctgagggaatccgtacgtcagtagctggtggcgaagctcactacgctgatgcagcactcggtgggttactgttcggcgctggcatgtcggccctaagtgacgctgtggctgctggtatccgtaaggctcgtggagtcgagtctgtgaatgagttcgctggtccagcactccgtatggaagcacgagagacagccatcaacactggtggtcacgatacctctacactacctccagagaacttctcgttcgagcagagccacggaggtgttccgttcgccaaccacccaaccgaagagggcgcagtggttcttgccaatggttccatcctgagcgacaccaacccgcttaacccaaggacccagcgggacttcgcagagattgacccagagcgtgcagctcccggtatcaaactcggtgggttcactgagattggcctgaagacattagggtccaaggatgctggtgtacgtgcaatcgctcaggacctcgtacgctctcccacagggatgcaatcagggtctagcggtaagtttggtgcgaccgcttcggacatccatgagcggctccatgcgactgaccagcggatgtataaccagctgtatgacgctgttgaccgtgccatgaaggacccagagttctccattggtgagcagaagatgtcacgcagagccatccgtcaggaagtctacaagcgtgctgccttggcgattgagcgtccagagttacaggctgatttgaccaaaggtgaacgtgaggtgatggacctactgaaagagcacttcgataccaagcgtgagctgatggaacagccgggtattttcggtaacgctaacgccgtgagcatcttccccggtagtcgccataagggaacctacatacctaacgtgtacgataggggtgctaaggagctgatgactcagaaactaggcggacctgaaggactccaacaggctatcgcccagagctggctcaccagttaccgagtgcgtcctgaggttaaggcacgtgtcgatgagtacctcatggaactcaacggctacaagtcggttgaccaagtgacacctgaggtggtccagaagcacgccatggacaaggcttacggtatcagccacactgaggacttcacggcatcaagtgtcattgacgacaacatcactggtctggtcggtattgagaacaactcgttccttgaagcccgtaatatgttcgacagcgacatcccggttaccttaccggacgggtcaaccttcagtgtcaacgacctgagggacttcgacatggcacggattatcccagcgtacgaccgtcgagttaacggtgatatcgccatcatgggtggtagcggtaagaccacgaagcagctcaaggacgaaatcatggcgttagacaaacgggccgaacgtaagggacagcttaagggtgaagtggaagcactgaaggataccgttaagattctcactggacgtgctcgacgcaacaatgacacagcctttgagacagctatgcgttccttgaatgacctagcgttcttcgctaagaacttctacatgggcccacagaacctcacagagattgctgggatgttggctaaaggtaacgttaaggcaatgttgcacggtatcccaacgctgcgagaccttgccaccagaacctctccggtgtccggtagtgaactccgtgaactccatggggcgctgttcggtaaggaactcgaccagttaatccgtccgggacgtgaggacatcgtacagagaatccgcgaggcttccgataccagcggggccatggcgtcagtcattggtaccattaagttcggtactcaggagctgtcggctcgttctccttggaccaagatgctgaacggtacggccaactacattctggacactgcccgtcagggtgtgctcggggatgtggctggtgctgccctcggcggtaagggttccaagttcggtaaggagaacttcctcaaagctgcctctatcagtccagagcagtggaagggcatcaagcaactctttgttgaccatgcgactcgtgatgccaacggccagttcactatcaaggacaagaaggctttcagtcaggacccgagagcgatggacctgtggcgtcttgccgataaggttgctgatgagaccatgctgcgccctcacaaggtgtcccagcaggattccaaggcgtacggtgctggtgtcaagatggctatgcagttcaagaacttcaccatcaaatcgctaaacgccaagttcattcggtccttctacgagggctacaagaacaaccgtgccatcgacatggccctgacccacgtgttgtctatgggtatcgctgggacttactttgcgatgcaggcccatgtgaaggcttacggactccaagaggctcaacgtaaggactacctgaagaaagctcttaacccgactatgctgggctacgcagcgttgaccagaagttcccacactggtgccccgctgtctatcgtttcgatgatggctggtgccgctggattccaagacgccaacatgctgcgctccaccatcttacctaaggaggaacagttccagaagaaagatggagcgtccaaaggtcgagccgagtcgagcaaccttgcgggtaacttagggtctcaggtcccagcgctgggttacgtagggaacgtcattgcgaccgctaagaacgcttacggtgttgctacagcgcctaacaagccgactgagcgtgactacatgactggactgatgaactccaccaaggagcttgtacctaacgacccgctcacccagcagctcataatgaaaatctatgaggcaaacggcgtgaccatcaagcaacagcctaaacctaactaattaggtagcactatagggagacctcttggtttcccttctcattcactttaaggaggtcataatggaccaagacattaaaacagtcattcagtacccagtgggagagactgagtacgacatcccgttcgactacctgtcccgtcgattcgtcagagtgtctctggtctctgaggattcccgcagactcctgagcaacatcactgagtaccgctacgtctccaagacccggataaaactactggtttcaactgaaggtttcgaccgtgttgagattcgtcggttcacctcagcctctgagcgaattgttgacttcaatgatggctctgtgctgcgagcaacagaccttaacgtatcacagctacagtcggcgcatattgcggaagaagcccgtgacgcagcccttctggccatgcctcaggacgacgcaggtaacctagatgcacgcagtcgccgtatcgttaacttggctcccggtattgacggcactgacgctatcaataaggaccagttagattcaacgctgggtgaggctggtggtatcctttctgatgtgaaagaagtacagaaggaaacctatgactacatcgagaagctcggtgatgacacttcgattgtccgtggggtaacttgggtgtataaccaagggtctgccgttggtggggagactacggtcctcatcgataaacctacccgcacacttgccgttccttacattgagattaacggtagtcgccaagaggttgggtatcacttctcgtttgacattgccacccagatgattaccttgacggaaccactggttgccggggacttcctgatggcaatgactacagagtccagtgtgcctctggaagaccttctggctaacccgactggtgcctcggctattggtacctccgatggtcgaaacgttcaggcaaacatcgacgagcttcgctccgagttagacttcctgaaagacacgacggtacttgacgttagacgctttggtgctgttggtgatggcatcgcagatgattacccagcgtttcagaaagcgtgcatagccgctagtcaacttggtggggcaatagtccacgtaccgactccaaaggtaaaatggaagattggattcccggtgtacttgttcgaccgcacttgggtccgtgggacaggcatcaactgtattgtcgagttcactgacccgctgtatgctcgcaaatcccgctctgggttcgtcatcgggtctggctacgagcagaaccgcgacaaggccattcagtgtcttaacgatggtacttgggccactactggctcggtggtaaataaggacttcgttgaattgggccgagggcagtacgtacgcgacaatcctagcaaggtccagtcaagactgtgcagagtgtccgggatgtacctgaaagcttcgtatccgaacggtgctaccctgaagggcggctacgctgtgtctggtgccaacgcggtagactcagaggtatttgacatttggggtgaaggttggactgagattatcaacttcgggtctgacgtaccgccagctacgccaagctgtcacaacctccatgcgtacgacatcacgtgtgttgctcctaacgactacgagacgtactacagcgcagggttcattgcgaactctacaagctgctctattggccgattcaagcagctcagggcaatagctgatggttctcctcacggttcctgtggttccatgaactacaccgagtattgctccttctacgatatcgacgtaccgagcttaggtcgtacagcctcgtctgagggtatccttgtgaacaactccaagggcgctgtgactcgtaacgttcgcattggtaacgctaagaccggggtggccgagtattacaccactggtgctggtatcttctacgacagagaccaacccaatgtgttcgatagtatccatgcgaataactgtgacaacgcggtagctctccgatccaagttctcggtttggaagaacgtgacgcagaccaactgtacctatcacgtctacttcgggacgaccaacgcacaagcctgtgtggtcaagttcatacctgacacaatcggtggtggtaataacgtagacattctggacagactccgcgacaacgtggttagtggctggcgtgttcgctccctccacatccgccctatcgcctacctactgaacgacaagtcagtattgcgtagctgggatgacggtaagaacatcaaggctgagaacggtgtgggattccagtggttattccctgtaccatctaccatgcgtgcaataactcaggtcagccaatggtttaccttcgaggtgggtgcagcgacggccgggacagaggtcaaggttcaggttcgccgtatgtcagcgtacaacggagacgccaacgagcagcctgtaatcctctttgagaacagccgcaaggcctctctggataccgtacaggcaaccaacgttgtagcgaactcctcaggtctggtcctgacgtcccctacggatggactggctaacgctgtggatgtcctcgtgagtgttacggcaccgaccgttaacttcaacatgaaagaagctcgcatcacgtatctgggcgactaactaaggagacagtatgttaaacaaattgaatcaacctaaaggctctacaatcggtgtgctcaaggatgggcgcaccatccaagaggcaatcgacgagctggagaagattaagacccgcaacgttgaccctgagcgcttccgtgagacgttgacgtcaagtgacgatgaggtattcgagaagctgttcgcgtggttggcaactcagtcagacgttgtgggaacctcaagttcttcatatatcacagccttacctcgcatgattgagcttagcggtcgtacctatacgttgactaagcgtcacgtgctggacggtaactttggtatacagaacggtaccatcctgatgtccggtgagggtgagattatcatgggcctcgatgctggtaccaagactcgtcgtcacttccttaagtatgtacatttcgagtacatcggggcatccgaccgtagcacctctctggtcaccatggcgcgctgcttcaactctgtggtgctattctgcaacttcatcgctggtggtgatgccgctcgcaacagagaaccgcgtacccgttatggcctgttcgcagggtccacccgttgctggggcttccagttaatcggtggtgagtattacggtggcgactgtgcgttgcgtgttggacgcgctaacgaccacactgggttgaccattcgtcccggtaccgttcaccactctcgtgttatcaacatgatgttgtgtaacccagcaggtgccgaggtgtctggctgtaacattgaacacgcagataacggtgcgattggcttagggattacgtcaggtaccaacacatccggtaacgcagcccacggtgttcgcatcaatggtgtgtacttctataacaatggcaatggctccagtgggtcaaacgttgctcccgcgaacatcctcatagggaaggacattccagggactgaaggctgggaccgaccgggcgagctgattacgtcaagtcgaaacactgcgcacagcattacggtgtcagagtgttacatcgttagcccaaacacccagaacgcttggcaggttaacgccctgtacggtgtatccttcttggacaacaaagtgggcctcaaaggtgacgctacgattcacggtgtgtatgacggtacgtgtgctaactgctgggcggttggtaaccgagaccaaggaggcaaggtattccagttctcctctacggcaaccaacgtgattctgactaccagaaagggtaagtggactccgaagattatcggtgagggcacagcaggtaacacgacgctgagtgcttctggtggcgcgtactctctggataacggaatggtcaccgtgtcgtgcttcgcagtggttgacactaaggacccaaacatggctggcaacctgaacatcaaactcccggtagcctgtgaggaccagcagcggggcggtacaggcatctcgttgacgaacgttccagacgtaccgagcccgaatggtagcataattgtgataggagacaccgctcgaatcatgctggggtctgcgagactacagccagcaaacgtcacgaccggtaccgccatccacttctcagtatcctacccagcagacgttaaggtataaggaggtaacatgttgtccctagacttcaataacgaagttatcaaggcggctcccattgcgggggtcgctggggctgacggtgtagcgaggctcttctggggcctctcactcaacgagtggttctacgtcgcggcaatcgcctacacagtggttcagattggtgccaaggtagtcgataaaataattgactggaagaaagctaataaggagtaacacatggacctgattaagttcctcgaaatgttagacactgagatggctcagcagatgctcatggacctgaagaatccagagaagcggacccctcagttgtacaacgccattggtaaactacttgagcgacataagttccaaatctctaagctgacccctgacgttaacatcttgggcggactggctgagggtcttgaggcttacaactccaaggtgggcgctgatggtctgacagacgacgatacgttcaccctacagtgatatactcaaggtactactatatgtagtgcctttatggatgtcattgcgctacgctaggcgttcctacgtgaaatctgagaaacaacgggaggcattatgctggagttcacaaagagaatcgtcccgtatcttgtggctatcatggtgtttgccttcgggtggcacttgggttcgcaatctacggacgctaaatggaaggaggtagtacagaatgagtacgtttcgaagcaaacagctagagttcaaactcaagcagcacttgatgagatatcggctaagtaccaagcagaccttgaggggctggagggcagcactgataggattattgctgatttgcgtagcgacaataagcggctgcgcgtcaaagtcaaacctaccagtgtccccgcaggaccagacggtcgatgcctcgttgatggttccatcgaactacacgaagcaactgctcgaagtcttatcgcaataacccagaaggctgacctcaaagagaaggccctacaggacacaattcgtaagcttcaagggaaaggaggtgaacattgagtaactctcagcaagccaagaacgccttaatcattgcgcaactgaagggtgactttgtcgcctttctcttcgtgctctggaaggccctgaacctgccggaaccaaccaagtgtcaaatcgacatggccaagtgtctggcagacccaaagaacaagaagtttatccttcaggctttccgtggtatcgggaagtcgttcatcacgtgtgcgttcgtagtgtggaccctgtggcgtgaccctcagttaaagatactgattgtctcggcctcaaaggaacgtgcggacgctaactccatcttcatcaagaacatcatcgacttgttgcctttcctgagtgagcttaagcctcgccccggtcagcgtgactccgtgattagcttcgatgtaggccctgccaagccggaccacagcccgtcagttaagtctgtgggtataacgggtcagcttactggtagccgtgccgacatcatcattgcggatgacgtggagattcccggtaactctgcaacccaaggtgctcgtgagaaactctggacgttggttcaggagttcgccgcactgttgaaacctctaccgactagccgtgttatctatctgggtacccctcagaccgagatgacgctctacaaggaacttgaggacaaccgtgggtactccaccattatctggcctgcacagtatccccgctccaaagaggaagacctgtactacggcgaccgtctggctccgatgctccgcagtgagtacgatgaggacaaagagggcctcagtagtcaacctaccgacccggttcgattcgactccatggaccttcaggagcgtgaggtggaatacggcaaggctggatatacgcttcagttcatgctcaaccctaacctcagtgacgccgagaagtaccctctacgcctccgtgacgctatcgtatgcggtctacagatggacaaggccccaatgcactaccagtggcttccgaaccgtcagaaccgcaatgaggagcttcctaacgtgggcatgaagggtgacgagatttactccttccatacaacctcaagtaacactggtgcgtatcagggtaagattctggtaattgacccaagtggtcgcggtaaggatgagactggctggtgcgttctgtacaccctcaacggctacatctacttgatggacgctggcggtactcgtggttacgaagagaagtcccttgagttcctcgctaagaaggctaagcagtggcaggtgcagactgtggtcttcgagagtaacttcggtgacggtatgttcggtaacgtgttccagcctgtgctcctgaaacatcacccagcgcaactcgaagagattcgtgctcgtggcatgaaagaggtccgtatctgcgatacccttgagcctgtactggcaagtcaccgcttggttatccgtgatgaggtaatccgtcaggactaccagacagcacgcgatgcagacggtaagcacgctctgaagtacagcctgttctaccagatgacccgtatgagccgtgagaagggcgctgtggcacatgacgaccgacttgatgcgttagcattgggtgtcgagttcctacgctctacgatgcagcaggacgctgtgaagatagaggctgaggtacttcaggagttcttggagcaccacatggagaaacccctgagtaacatctcacagttccgagccaccagtagcaacggtgtggacatccggtgggaagacgacggggatgactctatgttcatcgcatggtgattatgcagggattgtgcataaggattcattaggccacggaaggccacttttggaaaactctaagtataacagacacttggaattaggtagcactatagggagagacccaaggttacatactataagactacttaaagtttcattcatatagatatgcactttaagtctcctcaaaggcagagggtagtgatgataatatcaccctctcactataagacactaagagccaacacaaggaggacctatgcgcttactgttaaccttactgcgccataggactacttggcgatttctgctggtacttgctggtgcccttggggcttcactggttactcagcagcaactcggtggattggagactctcgtgtgctctctactcacttgtagcgattagggtcttcctgacgcgttagggattccgtagtgatgcttatcagcatacaccactccatccctctacagtcaatacttaaagttaaccttaggtgatccattgggtctacctacgggtctatgcaatgacctgaggactacctgaggttacctttaagaatatgacataaagttctgagtgtatatctcacagtttacacttttggttatcccccggtaccctctcagttcaccaaaagtaaccataggccaccataaaccttaggtgatacgttggtaatccttaggtgatactatatgttgtggtgtgggagacattgggatactatatgttgatgtctctgtgtccc

SEQ ID NO: 10 - DNA, 41182 bp, Unknown
  source: /note="Description of Unknown: KP3W-P0110 Bacteriophage sequence"
tatctgttggtactctccaagtatcctccaagtatcctccaagtatcctccaagtcatacctgaggagccaacctgaggttagacctgagaccatataccttaggttaaccatgtgaccatccagcgagtcatcactataaaggttattcagtggtcagtgtcaatatactaaacaattaggtatcactatagggagacactttaagtattactaagagaccatcaccataaagataactatcactataggtctacataaagtttaacttaaggtattgacattcagaatccgttatgagacattagcaaccgttgagagacacaacgtcaccaacgaccagacaataccacgagttatctggttagactgagggtctcaagtagtcatcaaccggacatacgaaaatggttgactcaacgatgaacaagtagtaagatgcaccacagattcacaacaacgaagtatcgctctttaacaatatggattaatcgctgacatgtacatcactcatcacttagtgtttaactagtggtcacattcaggtctctggcaaggtacgtcctgtcatcctgagagtggccacgctgataaccactaacatcgaggatatacaccatggaaatcgtaatgcaggcactgaaccacggggtcattatgacgacagcacgggactacaccggggccaccaaatacatggtgcaatacggcttacagttcacggtgtttgactcattccgcgaggcactgcaagattacacagattgcgtcacccactcgcaagagtgtggcgactagcggttaacgacaggtcatccgagaggtggcctgaaagataaccactaaccataggatatacaccatgatttacacgaaagaaccagccaacaaagtattcgtattcgttaccgcttaccgtggctatgagtcgctcgaagttaacgcgaagatgctcaagggtctcattaagaccattcgtacctatccgggagcgtacggcaacattcgtgctgagaacgtacagggctgctttaaagaagctggtatgtctgaggcaacgcaagagtgcacgcttaaggtggaatgtaccatcaaacaagcggctgagctggcgtggttagcatgtaagacctaccatcaagacgctgtactggtggttaactcacagactcacacggcctctctgtggtctatcgaggacgtaggcgaatatcctcaggtatatccacgcttgaaagaggtgtctttaggtggcacgctgcaacaagtggatgcaccgaagggcgagtgctattcaatcatcgacgggcaatactgggaggttgtttaatgatcacctactacgtgtacgtcaaccaaatggaatacttcgaagtagatactctggaggaggcgataagactgtgcgactctgtaccgggctcacatgttgaggatagcgtgttagatgaggtgatttatgcaaatagatagtgaggttacagtacacggaatcaccaaagagaagctggagttctaccgcttccgcatggtggcgtgcggtcgctcccacgattacctaatggcccaactggccaaaacctatagaactcgcaaggtgatgtatgctaatcgaatgcaacaatcttgataactttctggataccgtggcgggcctcgttaagcgcggcctcatgttcacctcgaacgcctcagcactgaccataacgttaaccggaggctactgagtgctaaccctatttgtgctcttcgtgtactcactgatagtcctgtacttccttagggaccttcgcaagggtcttaaggtacacagggcaacactaagctactttaagtggggcttcgtgcctcgctttactgtacggctacctaatggccgctttaaggcaaacaaggtaggtattttctacatcgcaacccattgatatcacacttaaggaaacacacaatgaactacaccgacatgcaagaacgcttagacgtcatccgtaacctgtcaatctgtgaactcgacaagcgccaaccgctattggttgcactcatcgcggaccttgtgaactgtgagacgtccgacggtgacgatacggccagcgattggggtctggaacgtcaggactattggcaaaccttgaagattaaggccaaagacgctgggtttaacctgctgggcaatggtcacttcagcgcagcgtttaagcacgagctgctaccgggtagggtcattaaggttggctttaagaaagaggactcaggggccgcctacgtggctttctgccggatgcaccaaggtcgggtagggattcctaacgtctatcacgtagcgcgtcacgctggctgctatacggtggtactggatgagctggaaccatgccagcgccgagcgaacgatgagcacgaccactacgcagacctcgcttatttctttgtcgagggcgactcggacccagaggagcacgcagaggatgaccagccatttattgagacgtgccagatgattcgcaagttcttctacgggattgcgtcttttgatatgcacagcggaaacatcatgttcaccaaagacggcaagccagtgattaccgacccggtgtcattctcagcggaccgggaccgtgagcctttctcgctggaacctgaggagctacttgcagagattgagcagatagcgcacgacaagatgattgaacgctgtaagcgcaacaaggctaaacgtgacccgaaaggggggctacgcatcgcacgccgtaaggctaataaggaacgtcgagcacgccgtaaggcacacgctaggaggctcaaggagcgtgaacgtgagcgcgagcagtatcacgtagacgccttaaaggcagacatagcgagtattgaagcgcgcgttccggtgtggtgcaggggaccgggcctagcgatacaaatgggcaagccgttgccaatcgacaattaccttcagggtagacttatgggttaactaggtgtatcttaggtgtctctcacgcaagaggcaccgatagataaactttattaacgccagttcgctggcaccaaagaggcacacaatgaacgcattaaacattgcacgtaatgacttctcagagattgaactggccgctatcccgtacaatatcctcagcgagcactacggggacaagctggcacgtgaacagctggcacttgagcatgaagcgtacgagctgggagaacagcgtttcctgaagatgttagaacgtcaggtgaaagctggtgagttcgctgacaacgtggccgctaaaccgctggtcttaacgctgcacccgcagttaaccaagcgtattgacgactggaaggaggagcaagcaaacgctcgcggtaagaagcctcgcgcatactacccgattaagcacggtgtggcctcagagttggccattagtatgggcgctgaggtgctcaacgagaagcgcggagtgtctagtgaggcaatcgcactgttaaccattaaggtcgtcttagggacgctcacagacgcctcaaaggccaccatccagcaggtgtcctcacagttaggcaaggcccttgaggatgaggcccgcttcggtcgtatccgtgagaaggaagccgcatacttcaagaagaacgtagcggaccagctggacaagcgtgtaggccacgtatacaagaaggctttcatgcaggttgtcgaggccgatatgatatccaaagggatgctgggtggtgacaactgggcgagctggaagaccgacgagcagatgcacgtggggaccaaactgctggagttgctcattgagggcactggtctggtggagatgaccaagaacaagatggccgatggctccgacgatgtgaccagtatgcagatggtccagctggctccagccttcgtggaactcctgagcaaacgagcgggagcactcgcgggtatcagccctatgcaccaaccgtgcgtagtccctcctaaaccttgggttgaaaccgtaggcggtggctactggtcagtcggtcgtcgcccgctggcgctggttcgtacccactccaagaaggcactgcgccgctacgcagacgtgcacatgcctgaggtatacaaggcggtaaacctcgcgcaaaacacgccgtggaaggtgaacaagaaggtgctggcggtagtcaacgagattgtaaactggaagcattgcccggtgggtgacgtcccggcgattgagcgcgaagagttaccaccacgcccggatgatatcgacaccaacgaggtggcacgcaaggcatggcgcaaggaggccgcagcggtataccgtaaggacaaggcccgccagtctcgccgtttatccatggagttcatggttgcacaggccaacaagttcgctaaccacaaggccatctggttcccgtacaatatggactggcgtggtcgtgtgtatgctgtgagcatgttcaacccacagggtaacgacatgaccaaaggtatgctgacgctggccaaaggtaaaccaatcggtctcgacgggttctactggctgaagattcacggtgcaaactgtgctggtgttgacaaggttcctttccctgagcgcatcaagttcatcgaagagaacgagggcaacattctggcgagcgctgctgacccactgaataacacatggtggacacaacaagattcaccgttctgcttcttagcgttctgcttcgagtacgcaggagttaaacatcacggcctgaattacaactgctcgctgccgctggcgttcgatgggtcctgctctgggattcaacatttcagtgcgatgctccgcgattccatcggtggtcgtgcggttaacctgctgccttctgataccgtgcaggatatttacaagattgtggccgacaaggttaacgaggtgctacaccagcacgttgtcaacgggtctcagacggtggtcgagcagattgctgataaggagactggcgagttccgcgagaaggtgactctgggtgagtccgtgctggctgctcagtggttgcaatatggtgtgacccgcaaggtgactaagcgttccgtcatgacgttggcgtatggttccaaagagttcggcttccgccagcaagttcttgaggataccattcagccagctattgacaatggcgagggcttgatgtttacgcaccctaaccaagcggctggctatatggctaagctgatttgggacgctgttaccgtgaccgtagtggccgctgtcgaagcgatgaactggctgaagtctgctgctaagctactggccgctgaagtcaaggacaagaagaccaaagaggtacttcgtaagcgctgcgcaatccactgggtaacaccagacggcttcccggtgtggcaggaataccacaagcgtgaccaagcgcgcctgaagctgacgtttctgggtcaggccaacgtgttcatgacgtacaacaaaggggacaccaaagagattgacgcgcacaagcaagagtcgggcatcgcgcctaactttgtgcactcacaggatggcagccacctacgtatgacagtggttcacgcctatgaggtctatgggattgactccttcgcactcattcacgactcttttgggaccattccggcagacgctggcaacctgttcaaggcggttcgtgagaccatggtgaagacttacgaggataacgatgtgattgcagacttctatgaccagttcgctgaccagctgcacgagtctcagctcgacaagatgcctgaggtaccagctaaaggggacctgaatctgcgcgatatcttagcgtctgacttcgcgttcgcctaaggtctcaggcaattaggtagcactatagggaaccttcgaatgaccgagggttccattacttaaagtcttaacttaaagaatacttaaagaggcacgccatgacttactcaatcgttgtaaccatcttgttaatcatcgtcacagcactcttcattagcgccatacgtgattcactacgcagtgaggagcgattgcagcgcacagtccgagaggccaactccgcgttcaacagcgagtcctgtaaggtcctacggttagcggacaaggctgactccctgagtcgggaggttcgttgcttagagagtgcgcttgaagaggagaaacagaaggagcgcgatgtgaatgaactcctagcgcaccagcgggaccgcatgaagttcctccgcaagtcgctgaaggaagcccaagacgagctgatgctggtctccgacctgattcacgttaagttcaccactgtgttgcctgacggtacccactctaagacgctctttaagttaggacttgggccgtgtggtctgcacgttaagtccctccgctggaccgagcttgaagaccgctatctgatagaccagctgtgcaccaatggcgagcgtaagcagttcgtctactacaagagcgaagtagtaggacgcatcgagttccgccacggtaagtctgaataaggtagcactataggaacatactcaaggtcatcacgttaggtggccttcatgaatgtcccttactatcgcaatcaggagtaacaccatgtatcagagcacaatcaacttcgagcgcagccgtgaacgtcagcagaccgagggttatatccctaagggccgcaagctgaacaagacgaaacgcggtggtggcgtgaagggttccttccgtaacgcgaagggtgacagcgttgttaaccaagagaaatacttcgtaggagcgtaacaaatggctgagcaaactaaatggctgttcgagggaagcacttcgcagtggtcacgattgggtgccacggagcgtagactgctggacgagacgggactccgtgtaatcatgacgtaccgccacttcaatcgcacagtgctgttctctgtgtacgaacccagaccagattacgatgaggtcctcgtggagaagtcctttagtcgctggtcgattgactcagcgtcagactggctggcaaaactcacagccgactactcaagttggaaatgattaggtagcactataggcagactcaaggtcatcgggttccggtggcctttatgattgcttattgcacactaaatgaacactacacttcggagacatcatcatgatgaacattaagaccaacccctataaggccgtatcgttcgttcgctctgctatcgagaaggcgctggagacttccggctacctcatcgcagacactaagcacgatggagtacgcgggaacatttgcgtagacaacacggccaacgcagcgtggctcagccgggtctccaagaccattccggcccttgagcacctcaacggtttcgaccagcgctggcagaagttactgaaagatgaccgctggattttcccggacggctttatgcttgatggtgaactaatggtcaaaggcgtggacttcaacacagggtctggcctactgcgtactgtctggctcaagcagagcaactttgcgttctctacctgtgaatactggcacgacgagtggaagaagaaagccaatcgtcaaccgttccacctcgacccttacaacctcaaagttgtcctctacgatatcattccgcttgacattatcgagtccggcgatgactacaacgtgatgaccctcctccgccttgagcacgtcaaggttgccttaccagttctgcaagaccacttccctgaagtcgagtggtgcctctcggagtcccatgaagtttacgacatggacgaactcgatgcgctgtatcgacagaaacgagaagaaggtcacgaaggtctggtggttaaggaccctcgcggtatctataagcgcggtaagaagtccggctggtggaaactgaagccagagaacgaggctgatggtgtcgttgtgggactcaactggggaactccaggtcttgccaacgagggcaaggtgattggcttcgaggttctccttgagtcaggttgcgtggtatccgctaacaacatctctcaggcacttatggaggagttcacgcgagccgtggaagccacagcagaccctcacgaaggttcctacactaacccttacgagggctgggcgtgtcaaatcaagtacatggaggaaactccagatggctctctgcgccacccgtcattcgataaatggcgtggaacagaggaagaccctaccgtcaagatgtaattatgtagcactataggagacaacaatatgtccatcaatctgattctaatcatcgtgttcatcctcgcggctatcgtgtgggcaatgaacgacgaaccaccatatagcggaggctaaaccatgcgtttacattacaacaaaacaaacggtatcttctcggttcgccgggaggatcgcagcactgtagcggcctcggagcgccacggtaagattccacgtatcggcgacaccttcgagctggcacccagcgtgcacattttggttactcgcggtctctacgaattggctcagactaagagccgtcctttcgtacccgtggtggtaaccaagtggccacgccttcgcctgttctgggagcgactcaaggaggttttcgatgacggccaagagtaagcacaaggaccactgcgcatccctgcacagcttccgagcgtgtgactgtgggcttgaacctagccgccttcacacaggcgactgtaagatatggaatggcgctggtcagtgtacctgcgagcagacccgagacgatggtgtcaagcagcccagtcactaccagctgttcgaaggcgtggagactatcgaggtgattgctcgcagcatgacccaagagatgttcaaaggttactgccttgggaacatcctcaagtaccgactgcgggcgggcaagaagtccgagctggctaccttagagaaagacatggcgaaggccactttctatctggagctgtacaccaagcacaagggtctgtgttatgacgccaagtgactggtgccgagcgatgtacgagaagacgctcgaccctgcgtacatcaccctgtataacatgtggaaggagcgagaagatgcaaaagttcgtcgtaacggtcgagacagctaacgcatcgtacgaactcccggtacacgctgggtctcttgaggaggccctcgaagttgccgaggcggagtacgaagagttaggccaagtgactcgggtacgcccagatagtcattaggtagcactatagggacacaggctgtccctcttactgtttaaacttaaaggagattcatcatggcattcgctaagaagaagatttataccaccaagattggtacctgtgagccgtatgcttacttcaacaagccggactatggcggtgagggttttgagaacccacgcggtacctacaaaggttccgtaacgttcaagaacgaagactgtcaggagctggtagacctcatcgtgaagacccacgaagagaactacgctgagcgtctggaagcatacgaggcgaacccgccgaaggttcagaagggtaagaaacctctgaagccgtacgaaggtgacatgccgttcttcgacaacggtgatggtaccaccacgttcaacttcaagtgctacggttcgtacgaagacaagaagactggcgagaccaagaagattgttcttggtgtagttgatgctaagggcaagcgcattcaggacgtgccgattatcggtggcggctccaaggtcaagattcgcttctcgctggtaccgtacggctggtctgcggtagctggtgcttccgttaagttgcagctggaaggcgtcatgctggtcgaactggctaccttcggtggtggcgaagacgactgggctgacgaggccgtagaaggcggttacgaagcggacgaacctcgcagccgtaaacctcaggaagacccggaagactggtctggtgaggaagctgacgagggcgcagccgaagaagacgatgacttctaatggcgggctatggggccaaagggattcggaaggtgggtgccttccggtctggccttgaggacaaggtgtccaagcagttagaatcaaagggcgtcacgttcgactacgaattgtggcgcatcccttacgttattcctgcgagtgaccacctttacactccagacttcttgttacccaacggtatcttcgtggagactaagggtctctgggaagccgaggaccgcaagaagcacctactgattcgtgagcaacatccagagctagacattcgtctggtattctcgtcgtcacggaccaagatttacaaagggtcgcccaccagttacgctgagtggtgcgagaagcataacatcttgtttgccgacaaattgattcccgtagactggctgaaggagccgaagcgtgatgtaccgttcggcaagttcaagcagaagaaaggagcaaagtaatgattcaccccaaacttgagatagtgcctaccgattcctgcatcgaatggacaggagcgcaccacaagaatggatacggagtcatctcccttaaccgcaaggttgcccacgagcttggcgtgtcgcgtgtacagttcgtccaccgagcgtcatacatacagcacaagggacccattccgagtgggcttgtagtccgccatacgtgcgacaataagcgctgctataaccctgagcatttgctgcttgggacacagaaagataatgcagacgacgctgtggagcgtggcctgtctaaacgaaaactaaccgatgcagatgtggaggtaatacgctcatccagtgaatctaacaggaagttaggtaaatactatggagtcagtgcaacaactatctatcacattaagcacggcactaaatggagacacgtaaatgcctaaggtacaattcactaaacgaaaggagacctctcagattttcgtacactgctccgcaaccaagccgtctatggacattggtgtccgggagattgctcagtggcacaaggagcagggatggttagcaattggataccactttgtgattcgtcgtgacggtaccgtagaggctggtcgtgaccaagattctgttggttcacatgtcaagggatacaactcgacttctgtcggtgtgtgtctggtaggtggtatcgacgccaagggtaaccctgaagcaaacttcacgccagcccagatgcagtctctgcgctcactgctggtagaactgaaggtgcaatactccggggcagtgttgacggcacaccacgatgtagcaccgaaggcttgcccaagcttcgacctgaagcgctggtgggagaagaacgaattggtcacttctgaccgtgggtaaacattaggtagcactacagggagacaattgcgtttccctgttgtcgcttgaggagattactttatgagcaaagaacacatcatcgacattgcagtcctcattgtcacaatactgtccgcaatggtacttggtgccacccttacgtattcctatcttaattgaggtgacccatggaaaacttaaagcaacacttcgctgacacatggcctctgtatgcttacgcatcatgctttgtatttggcggactacgtttggtgttctgcctatgagttacggagactctcaagaggacggtcaggagagtatcttcctgttccacgctccgtgcgaaaactgtggttcttctgatggtaactcagtgtactctgacgggcacgagtactgcttcgtgtgtcaacaccgggttcccggctcagaggaacgtaccgaaaagttatcatcgagaaggcccaaaggagggaattacgggatgaatacacaaggttcaggcttattggtattcggcgagagtgacggtcggtacactgacctgacggctcgtggtatctcaaaggcgacatgccagaaggctggctattgggtcgccaaggtcagagggactgcctatcaggtggccgactatcgcgaccagaatggctccatcgtctctcagaagctgagggacaaggagaagaacttctctaccagagggtctcacaaaggggatgcactgttcggtaagcacctatggaatggtggcaagaagattgtcatcaccgagggtgaaatcgacatgttaaccgttatgcaacttcaggactgtaagtggcctgtggtttctctcggtcacggtgcgtcagccgcaaagaaaacttgcagtgcaaactacgagtatttcgatagcttcgaccagattatcctgatgttcgatatggatgatcccggtcgtgcagccattgaggaagccgctcaggttctccctcccggtaaggtacacgtagcggtactgaccgagaaggatgccaacgagtgtttactcaagggcaagggcaaggaggttctcgaccagatatggaacgcggccccttgggtgccagatggtgtaattggtgctatgtccatgaaggaccgggtgcgagaggccatgaccagcgaacagagcgtgggataccttttctcgggatgtccgggactgaacgaccgaaccttgggtgcacgtggtggcgaagtcatcatggtcacttctgggtcaggaatgggtaagtctacgttcgttcgccagcaggccctagggttcgccagagagcaaggactgagggtaggcatggcgatgcttgaggagtccgtagaggagacgatggaggatgttctagggattgctaacggcatccgcttacggcagcaacctcgggagttcaagcagaaactgatagaggacgggacgtatgacaaatggttcgatgagttgtatggcaccgaccagttccatctctacgactcctttgcggaagctgaggtggaccgcctgctggccaagctacactacatgcgcacagggttaaactgtgacgtaatcattctggaccacatctcaatcgtagtgtctgcctcagaggaatccgatgagcgcaagatgattgaccgactcatgaccaagctgaaggggttcgctaagtcaaccggagtggtacttattgttatttgccacctgaagaacccggagaaaggtaaagctcatgaagaaggacgtgctgtttccattactgacctgcgtgggtctgggtctctgcgtcaactctctgatactatcattgcccttgagcgtaatcagcaaggggacatgcctaatcttgtcctccttcgtattctcaagtgtcgctttaatggtattggcgttggtattgcgggatacatggagtacaacgaaaggaccggactccttgaaccgtctagctacactggcggagaaggagagggtgatactggctgggaaggccacgaagaagacgactattgaaccagactggaagttaacaacacaatgtaattgcccatgggatagaccgtgcgtctgtcctgaccgggcttaatcaacctgaggagaaccatcatgtttaaacttatcgaagcattaggccgtctggtcatcgcgttgtacgtacgtgaagccaaggcactggacaaagcgtccaaggtggaagcagaagcagccgctaagctggctaaggccgccgacaaggcacgtcaggcatctcttgatgcaaccgcagaggcagcgaaagttgcacttaaagctcagaaacttaaggagttcttctaacccatggacatttacgtgctagtcggtatgcttattggcgtcctgctcatacatctatcaacataaggagttcttctaatgactaccaaagctaaatttcccggcaacaccattcagctgtccgacactgtagaccagtggggccgcaaggttcacatcaacgtgcgcaacgacaaggtaactctggtctaccgctggaaggcaaagagtgataaccgtgctcacactcagcgtgtgaccctagacgatactcaagcagctcgactgctggcatccgtagccgtagccgctactgtggccatcggtgaggacaaagtgcgtgaggccatcctgagtaaagaggtaggctcaacggcaacccgactggccgaagcgtcagaagctaagtgataaactcaaggtcattactatatgtagtggcctttatgattatcatacacaacatattgagaggacataaccatgcgtaaacctgaagaaatccgtgcagacatcgagaagctgaccaaagagctggaagctgttaaggttcatgagtccagacaggttgctgctgttaacatcctgtataacttagggtggacacacgaccctcacaaaggctggcagaaacccacaccaaagtggagtgactacaaggccccgcttaaggctggcgagctggcaacttgggacgacaggtttctcggtggaatagtgtacatccgaagtgttggagacaagtttgcccaagtgtcccgcgttcgtggtgttagtagactgggagctgatgtactgaacagtagctttgccgtagagaaaagtaagttaaccgtgcgtccacgtgagtatttcatcgggcgtcgttaagtaacaggagaccactatgttagtatccgatatcgaggctaacaacctcttagagaaagtcactcagttccactgcggtgtcatttatgactacagcacggacgagtacgtatcgtatcgaccttgggacttctccgcgtatctcgatgcgttagaagccgaggtggctcgtggtggtctcatcgtattccacaacggtcacaagtacgatgccccagtgttgaccaagctggccaagctccagttaaaccgagagttccacctgccgcgtgagaacgtagtggacacgttggtccttagtcgtttgctgtatgcgaacatcaaggacaccgacatggccctgctgcgttccggtaagttacccggtaagcgcttcgggtctcacgctctggaggcgtggggttaccgcttaggtgagatgaaaggtgagtacaaggatgacttcaagaagctccttgaggaacagggagaggactatgtggacggtgctgagtggattagcttcaacgagccgatgatggactataacgttcaggacgttgtggtgaccaaggcgctcttagagaagttgctgagtgacaagcactacttcccggatgacgttaactttaccgattgctgtactgatgccttttggtatgattcctgcgaggccgtctggctggagcacagagctgcgtggttgctcgctaagcaggagcgtaacggcttcccgtttgacaccaaggccatagaggaactctacgttgaactagctggtcgtcgttctgaactccttcagacacttaccgacactttcggtacttggtaccaacctaaaggcggcactgagttattcctacaccctcgcaccgggaagcctcttggtaaatacccgcgagtgaagtacccgaagcagggcggcatctacaagaaacctaagaataaagctcagcgtgagggtcgtgaaccctgcgagctggacactcgggattacgtagagggcgctccgtacacaccagtagagcacgttgtgttcaaccctagtagccgagaccacattgcactcaagctgagggaagccggatggatacctacagagttcaccgataaaggtgcgcctaaggttgacgatgaggtccttgagcatgtgcgtgtggacgaccctgagaagcagcgctgtattgacctcatcaaagagtacctgatgatacagaagcgcataggtcaggcagctgagggtgacaaagcgtggctacgttacgttcaagaggatggtaaaatacatggttcagtcaatcctaatggtgccgttacgggccgagcgactcacagcttcccgaacctcgggcaagtaccgggtgttcgaagtccttacggcgagccttgcagggctgcttttggtgctgagcatcaccttgatggcctcactggtttaccttgggtacaagctggcatcgacgcaagcggtctggagctgcggtgtctcgcccacttcatgtccaagtacgacgggggagcttatgcagatgttattcttaacggggacatccacacagtaaaccagcaggctgctgagctgcctacacgcgataacgccaagacattcatctacggcttcctctatggtgctggtgatgaaaagattggacaaatcgttggagcaggtaaggaacgcggaaaggaactcaagaagaaattccttgagaacactccagcaatcgcagctttgcgtgaaggaatccagcagaccctagtcgagtcatctagatgggttgccggagagcagaaagtcaagtggaaacgtcgttggattaaggggctcgatggacgtaaggtacacgtacggtcaccacatgctgcactcaacaccctccttcagtcagcgggcgcgctcatttgtaagctctggattgtcgagactgaagagttacttctcaaagctggattaaagcacggttgggatggtgattttgcgtacatggcgtgggttcacgatgaaatacaagtggcctgccgtaccccagagattgcacagcaggtgattgacattgcacaacaagcgatgcgtaacgttggggaacactttaagttccgatgccgtctggatacagaaggtaagatgggtccgaactgggccgtatgtcactaatactatacaggagatttatcatggctatgactaaacgtgtgcgcgtaacatttgactctaagtttgtagcaggtacgaatgatatcaacgagttcgctaagacacttgtgagctactctaagcgcttcatggagggtgatagtaccctaaaaggcgaccagctggctcttgcagagatggcggcgaaggaaggcgtagaggctgctgtggaactgtctatcaaaatgtcctactcaaaagctatcaagagtgaactagctgacgactgcgtgacagtctccaacattcgaatggagattaaacagtgagcgagtacctaaaagttctggcggccctcaagggctgccctaagtccttccagtcgaactacgtgcggaacaacgctgcgttagtcgctgaggctgcgagccgtggtcacatttcgtgtctgaccatgagtggtcgtaatggcggcgcttgggaaattaccagtgccggagtgagattccttaagacccatggaggttgcttatgagaaagagaatggtgttcgtgcacccgttggaacctaaatcacactgggaaactgctgatggcatcgtctggttttataaggaaggccacatgctgcgacagtcccatgtcacccacaaggaccttcacgacccggagatgggctttaagttcaaggagttaaagaatgagtaagcacacattgttatccttcagtgactaccgggcaacccagaagatttccaagggtgttcttgtgatggatggtgactggctggtattccaagccatgagtgccgctgagttcgatgcctcatgggaggaagagatatggcaccgttgttgtgaccacgctaaggcccgagagattctggagaactccatcgagtcctacaagggccgcaagaaggcatggaagaatgccgatgtagtcctagcgttcactgaccgtgtcaactggcgtaagctgctggttgaccaaacgtacaaagagaaccgcgctgtaaccaagaagcctgtgggttacttcgagttccttgagtccgtcttcgagacctacacgtgcgtccttgagccgcagctggaaggcgatgacgtgatgggtatcatcgggtctaaccctctcgtgtataactacgagaaggccgtgctggtctcctgtgataaggactttaagaccatcccggattgtgatttcctgtggtgcacgactggtaacatcctcgttcagactcaggagaccgctgactactggcacctcttccagactatcaagggtgacatcaccgatggttacggtgggattcccggatggggtgataccgctgaggacttcctcaaggaaccattcattgtggagcctgtaacgtccgtactgaagtcaggtaagaacaagggccaagaggtaaccaagtgggttaaacgcgctcctgagccgggagagacgctatgggactgcattaagtccattggtgccaaatcagggatgaccgaagcggaagtaatcaagcagggccagatggctcgcatcctccgttctgatgagtacaacatcgagactggggagattactctatggcaaccgggcagttaattctcatcgtcctgaccatgggcttaatcgctcgtggtctctggatgttggccttgattatcaagcagatagtcgagcacaaagcagagtgataaactcatgggcactaattaggtagcactatagggaagtgcccattatgattattacttaaagattacttaaagaggagactcaaatgttaaaacctatagagcatatccttaacaatcctaatgaccttcctgacgtaccgcgagctgtcaaggagtacctacagtctcgctacaatgctgacttcctgtatcaatcagaggtccgtaagctgcgtgaggctggccacagcgaggagttcatctccggggtactgtacggtcactacatggcttctcgtgtccttgatgagatggagggacgccagcgtgcactcaaagaaggagattgattatgtgtttctcacctaagatgaaagcacctaaggttgacacaacgactgtccctgagccagcgccactgacggaggaaccaaagggtatccagtatggtggcgacgaagactcaaacagcaccactcctgaggtgtcagggcgtaagtcactcaaggtgaccaagacgaccgagcctacagggtccgtcagtaaaatccgtaagtcagctttaggaggctaacatgggactgttcaagaaaatcaataaggctatctccaaggtagtcaaagcgccactcaaggccgtgggtctggcagcagatgcacctaacgtgcagacagccgctgagacacctgtggccgcacctcaggaagcaccaaaagaggtcgtggaggacgttgagtcttcagcagacaccgagtctggaaggaagaaatccagagcgtctggcaagaagtccctctcagtttcccgcagctcgggcggtgggattaacttatgattggttacggggagggctaacaaatggcagaagttaaactcgaaggcttcgcagaggagggagccaaggcggtatacgaccgtctgaagaacgaccgacagccttacgagacacgagcagagtcctgtgcgcagtacacgattccctcgctgttccctaaggattccgataacgcatcgactgattacacgactccgtggcaatccgtaggtgctcgcggcctgaacaacctagcgtccaagctgatgctggccctgttcccgatgcaatcatggatgaagttgaccattagtgaatacgaagcgaagaaccttctgggtgacgctgagggtctcgctaaggtcgatgagggcctctcaatggtagagcgaatcatcatgaactacatcgagtccaacagttaccgagtgactctctttgagtgcttgaagcaactgtgtgtggctggtaacgcgctgctgtacttaccggagcctgagggttatacccctatgaagctctatcgactgaactcgtatgtggtacagcgagacgctttcggtaacgtactccagattgtcaccctagacaagattgcgtttaacgctctccctgaggatgtccgcagccaagtggaagcagcccaaggtgagcagaaggaagacgctgagattgacatctacacccacgtgtatctgaacgaagccggggatggttactcgaagtacgaagaggttgccgaagaggtagtaccgggcagcgaagctgagtaccctctcgaagagtgtccatacattccggtccgtatggtccgcatcgacggtgaatcctacggacgttcctacgtggaagagtatctgggagaccttaagtccctagagaacctccaagagtctatcgtgaagatggcaatgattaccgccaaggttatcggtctggtagacccagcaggcatcactcaggtccgccgactcacggcagcacagtctggtgcgttcgtaccgggccgtaagcaggacattgagttcctccaattggagaagtccggtgactttaccgtagcgaagaacgtaagcgacaccattgaggctcgcctctcgtatgcctttatgctcaacagtgcggtacaacgtacaggcgagcgagtcacagccgaagagattcggtacgtggcgtcagagctggaagatacccttggtggtgtctactcgattctctcacaggaactccagctgcctctggtaagagtgctcttgaagcaactacaagccacgcagcaaatcccggagttacctaaagaggccgtcgagccaactatcagcactggccttgaggctatcggacgtggtcaggaccttgacaagctggagcggtgtattgcagcgtggtcagctcttaaggccctcgaaggtgatgatgacctcaacttggctaacctcaagttgcgcatcgctaacgctatcggactcgacacagctggtatgctgctcactcaggaagagaagaacgcccttatggcacagcaaggtgctcagattgctacacagcaaggggccgctgcgttgggtcaagggatggccgctcaggctactgcaagtcctgaggcgatggcagctgctgctgattccgtaggtatgcaaccgggtatgtaattaggtagcactatagggagaccgattggtttccctcttagtcttaactttaaggagattgaaatggctggcgaatctaacgcagacgtatacgcatccttcggtgtcaacagtgctgtgctgactggtagtacacctgaggagcaccaagaaaacatgttggctcttgatgttgctgcccgtgatggcgatgatgcaatcgagctgaacaccaacagtgatgacccgtatggctccgatgtggacccgttcggtgaacctgaagagggccgtatgcaggtccgcatctccgctgacggttcagacgaagagtctaccgaaggtgaagagggttctgaagaagaacagcatggcgacgaagggagtcagccggaggaagtaaccgacgatggcgaacatgaagagttcaaaccgattggtgaaactccggctgacatcaacgaagcctctcagcagctggaagaacacgaagctggctttaacgacatggttgccactgcaatcgaacgcggtctctcacaggatgctgtgacccgtattcagcaggagtaccagaacgaagacagtttgtccgatgagtcctaccgagagttggccgaggctggctacagcaaggcgttcgttgatgcgtacattcgtggtcaggaagctctggtaaaccagtacgtagaaaaagtgatggacttcgtcggtggccgagagcgcttccagcaggtctatggtcacatgaagaccaataaccctgagggtgctgaggcgctcatcaaggcttttgagtctcgtgacgtagccaccatgaagacgattctgaacctagcgggacagtctcgtgataaaacctttggtaagaaagctgaacgcactattaccaagcgtgcaaccccagcgaaacctgtggcccgtaaggctgaaggcttcgagtctcaagctgagatgattaaagctatgtctgacccacgttaccgcaccgactctaagtaccgtcgtgaagtggaacagaaggtcatcgactctaagttttaattaggtagcactatagggagaccccagcgccgatgcaaggctggtacttctcccttcgagttacacaatgagtatcacctcgtttcaagtagtacctcaaaaaacatttcgtataaacaacataaggagattcaacatggctaacatgcaaggtggacagcagctcggtactaaccaaggtaaaggtcaatccgcagcagacaagctggcgctattcctgaaagtattcggcggtgaagtcctgaccgcattcgctcgtacctctgtgacctctaaccgtcacatgcagcgtcaaatcagctccggtaagtccgcacagttccctgtgattggtcgcaccaaagctgcttacctgcaaccaggcgagtctctggatgataaacgtaaagacatcaaacacaccgagaagaccgttaacattgatggcctgctgactgcggacgtgctgatttacgacatcgaagatgcgatgaaccactatgatgtgcgctccgagtacacctctcagattggtgaatctctggcgatggcagctgatggtgcggtactggccgagctggccggtctggttaacctcgctgattccgtcaacgagaacatcgctggtctgggcaaaccgtccctgctggaagttggcgctaaggctgacctgactgacccggtcaaactgggccaagcggttatcgcacagctgactattgctcgtgcggctctgaccaagaactacgtcccggctaacgaccgtacgttctacaccactccagacgtgtactctgcgattctggctgctctgatgcctaacgctgcgaactatgcggctctgatcgaccctgagcgtggttctatccgtaacgtgatgggcttcgaagtcgtcgaggttccgcaccttaccgatggtggtgctggtgatgaccgcccagacgaaggcgcagatgcgaccaaccagaagcacgccttcccggcaactggcggtaaagtcaacaaagagaacgttgtaggcctgttccagcaccgttccgctgttggtactgtcaagctgaaagacctcgctctggaacgtgctcgccgcgctgagtatcaggctgaccagattatcgctaagtacgcgatgggtcacggtggtctgcgccctgagtctgcgggtgcgctggttttcacggcggcctaagcgtaaatacctttagtgctcgggtggtaactccacctgagtacgaggtacagactgtagccattgatggtgattcacttaaggtggcactcgatgggctggagagtgtaacggactggtcaacccttgaggtaacttatggtacttcagggattgtcagccatactcgccggaccaacacgctgtacttcaaaggaatcgctgtaggcgaaactctggtgactgtcagttttgatgggtctgaaaggaagacctttaagctggtcgtgactaactaataagccaaaccccttggggaccactcacggtctctgaggggttttttcgttaggagcttacattatgaacatgcaagatgcttactttgggtctgcagctgagctggatgctatcaacgagatgctcgcagctatcggtgaatccccggtgaccacccttgacgaagatggtagcgcagacgtagcgaacgctcgccgtatcctcaacaggattaaccgccagattcagtctaagggttgggccttcaatatcaacgagtcggccacactgaccccggacgcagacactgggcttatcccattccgtccggcatacctgtccatccttggtggccagtacgttaaccgtggtggctgggtgtacgataagtccacagggacagacaccttctcggggccaatcaccgttaccctaattacccttcaggattacgacgagatgcccgaatgtttccgccagtggattgtcaccaaggccagccgccagttcaactctcggttcttcggagcggaggacgtagagaactcactggcacaggaagagatggaagcacggatggcgtgcaatgagtacgagatggacttcgggcagtacaacatgcttgacggtgacgcatacgttcagggtctcatcggtcgttaatcagaaacttaaggaggaccaaatggctctcgtatcacaatcaatcaagaacctcaagggaggcattagccagcagcctgaaatcctaaggtacccagagcagggtacgcttcaggtcaacggttggtcctccgagactgagggtctccagaagcggccacccatggtgttcatcaagtccttgggaggacgcggatatcttggggaggacccctacatccacctcataaaccgtgacgaatacgagcagtattacgccgtgtttacagggaatgacgttcgggtattcgacctgtccggctatgagtatcaggtccgaggggaccgctcgtatgtgaccgtccataaccctaaggataacttgcggatggtcaccgtggccgactacacgttcatcgtgaaccgtaccagacaggtccgggagagtcagaacctgaccaacggtggcaccttcagggataacgtggacgcactcattaacgttcgcggtggtcagtacggtcgtaagctcgaagtgaacattaacggcgtctgggtaagccaccagctccctccgggtgacaacgctaaggatgacccacctaaggtagacgcacaggctatcgctgaggctctagctactctcctcagagcggcacatcctacgtggacgttcaatgttggaacagggttcattcattgcatagctccggcaggcaccacacttgacatattagagacaaaggatgggtatgcggaccagctaatcaatccagtgacccattatgtccagagcttctctaagttacctctgaacgcaccagatgggtacatggtgaagattgtcggggacacatccaagaccgccgatcagtattacgttaagtacgacaagagtcagaaggtctggaaggaaactgttggatggaacatctcgataggactggattacaccacgatgccttggacccttgtcagggcagctgacggaaactttgacctcgggtatcacgattggaaggaccgacgtgcgggtgacgaggataccaaccctcaaccgtcatttgtgaactcgacgataactgacgtgttcttcttcaggaaccgcttagggttcatctctggggagaacattgtgatgtcccgtaccagtaaatacttcgagttctacccgccgtcagtggccaactacacggacgatgacccgctggatgttgctgtgagtcataaccgtgtgtcggtccttaagtatgctgtgagcttcgctgaggagcttctgctgtggtccgatgaggcacagttcgtcctgtcagccaacggtgtgttatccgctaagacagcacagctggacctgaccactcagttcgatgtgtcagaccgtgcgcgtccttatggtatcggtaggaacatctactatgcagctcctcgcagctcctttacgtccatcatgcgttactacgcggtacaggatgtaagctctgtgaagaacgcagaggacatgacggcccacgtcccgaactacatcccgaacggtgtatatagcatcaacgggtccggtactgagaacttcgcgtgtgtgctgaccaagggtgctcccagcaaggtgttcatctacaagttcctctacatggacgagaacatccgtcagcagtcgtggtcccactgggacttcggggatggtgtggaggtgatggccgcaaactgtatcaactcaacgatgtacatgttgatgcgtaacgcctacaacgtgtggatagctgcggttgactttaagaagaactctacggactttccgttcgagccttacaggttccacgtggattccaagaggtcataccgcatctcagagactgcgtatgacattgagacgaaccagacggtagtgaacgtcaaggacatctacggtgcgtcattctctaagggtaccgtggcaatctgcgagagtgacggtaaaatcaccgagtacgagcctacgggttcctcttgggattcaaccccggacatccgcattagcggcgacatctccggtaaggacattgtcatcgggttcctgtacgacttccagtatgtgttcagtcggttcctcatcaagcaggagcagaacgacggcacaacgtccactgaggactctggtcgcctacagctgcgcagagcgtgggtgaactatcaggacactggcgcgttcactgtgagcgtcgataacggtagccgggagttcaactatctggtcaacgcccgagtaggttctactggtctacgtctgggccagaaggccacgaccactggtcagtatcgtttcccggtgacaggtaacgcactgtatcagaaggtgtctttgagttccttcaacgcttccccagtgtcaatcattgggtgcggctgggagggtaactacagcagacgcgctaacggtatttaactaaatgtctccctgtggtgccgctcaattaggtagcactatagggagaccacactaagaggggacttaaagcatgtacataagaaacactgtaagtaatgacttcgagttattcatcccggcctaccatgacgtacttgaggcgcaggccatgggtatagaaccatcgttcccagcggttactgagtgtgtcacgttagaccacgatggttttcctttggctataggtggacactgcggagaccagtgctggttcgtcacgagcgaccaagtgtggagactcgacagggctggtaagctggagttccgtgagagaatcatggagtacagggacatgttattaaatgtttatccatccctgtggaacttcgtgtgggtcggcaacggtccccacaagcggttccttaagtccatcggtgctgtattccacgaggagtacactcagggtgggaagttccaactgttcaccataacgaggaggtaactatgtgctggatggcagctattcctattgcaatgacagcagtacaagccatcggtcagtcgcgcagcgacgccaagatgattggtcttcagaatgaccagatgcgccgacagtctgctcaaatgattaaagagtcaaacattcagaacgctaacgccagccttgagcagaagcagaagctggaagaagccagtgcggacatgaccgctaagaatctcgataaggttcaggccatgggtacaatccgtgcagcaatcggagagggaaaccttgagggtgccagcatggaccgtatcagtcgaatcgaggagggcaagttcattcgggaggccaacgcggtcaccgataactaccgtcgagactatgcgtcactgttcgctcagcagctgggtaactccgagtcaactattgaccaagttaagtccatgcagaaggctgagggcaaaggtaagtccaagctggaacaggtgctggacccgctggccttaatgggttcgcagggtgcctcagcgtatgcttccggtgcgttcgatagcaagggcaccaaggcaccaataagtaaggcccaaggtactaaggtaggaggtaagtaatggccagtaaattagaacaagcattaagccaactcccacaggctgggtctacccgcatccgtggtggctcagcgtccatgcagtatcgcccggtgaccatccaacaggaaggtgccagacagtccaacctagtgcagtccttggcgaagtttgggacagcagtaggagaagcagcggacgcatacgacaagcgccagcgagacaaggctgacgagcggtccgatgagattatccgtaagttgaccccagagcagcgccgggaggcaatcaagaacgggaccctactgtatcaggatgacccgtacgctatggaggccctgcggttcaagactggccgtaacgctgcattcctcatagacgacgaagtggcacagaaggtccagaacggtgagttccgtacacgtgccgagatggaagagtatcgacacaagcggttgaccgaaggtgccaacgagtacgctgagcagttcatgattaaccctgaggactctgagttccagagggggttcaacgcgaacatcaccgagcgtaacatctcactgtacggcaagcacgatacgttcctgagcgagcaggcacagaagggtgctatactggcctcgaaggtggagctgtcaggtgtgctaaaagaccctgccgttctggcccgtccagagtccggtgagttcttccagcgctacatcgacaatgcacttaagactggaagtatccctagcgacgctcaggcacaacaggtcatcatcgggtccctcaacgacgtcatccagcgtccgggtgcgaccaacttcttgcagagccttgagggccgtccggtcacccttaacgggaagaccacgacctacaaggaacttatgggagaggagcagtggaatgccctgatggtcaaggcccagtcaacccagttcgacaatgacgctaagttgtccgaaggtttccgccttgggatcaccagtgcgttgaaccaagacgacaccagcaagggctgggagatgcttcagggtgccaaggcagaactggaccgtcttcaacccggtgaacagatgacacccgagcgtgagcgcctgattcaagctgaggaacagatgcaggcccgtttccgtcaggaggcccaagcggcagccaaggagatggacaagcgtcagaagaccattaacaagaatcaggtcatcgaccagcagttcaccaagcgcatcaacgggcagtatgtgtccaccagctacaaggacatgccgacaaatgagaacactggcgagttcactcacagtgacatggtgaactatgctaacggtaagctggctgagattgaccagatgcaactcacggaacaacagaaggaccgcatgaagctgagctacctacgggcagactcagagggtggagccttccgtaccgttgtaggccagatggtcaccgacgctgggtctgaatggtctgccgctgtgattaacggtaagttaccagaggacaccacggcgttgaacaatctgcgcaccatgcgtaacaccgacccggacctcttcgctgcactgtacccggataaggctgacttgtttctgacgatggacatgatggacaagcagggtattgacccgcagattcttattgacgctgaccgttctcgccgcagcctcaccaaggagatgcagtacgaggatgataaggcgtgggcgtccctgaagaacaactcagagtctcccgagctgtcccgcattccagctagtctggatggcatggcccgtaagatttacgacagcgtcaaataccggacaggtaacagcgacatggctatgcagcaggtagacaagttcctcaaggaatccactgtgactttcaaaggtgatgacgtggatggcgataccattggtattatcccgaagaacatcctacaggtcagtgatgaccctaagagctgggagcagggccgagacattctcgaagaagcccgtaagggaatcattgcggctaacccttgggtgaccaacaagcagctgacgatgtaccagcagggtgactctatctacatgatggacaccactgggactgttcgcatccgctatgataaggagctactggctcgaacctatcaggaacagcagcagcgactggctaaggaagctgaagagaaggcgctgaaggaagcaaccaaacgcgcacctatctccgcagccactcaggcccgtaaggccgctggtgagcgtgtccgtgcgaaacgtaaagccactccgaagttcatctatggaggtggcgatgagtaaacaataaggagacaacatgagctacgataagtccaaacctagtgactacgacggtatgttccagaaggcagcagacgcacacggtgttagttacgacctactgcgtaaactgtccttcaacgaatcatccttcaaccctaaggccgtctctaagactggccctaagggcatcatgcagttcaccaaagcgacggcccggagcatgggccttaacgtgaccgatggtgatgacgatgggcgctacaaccctgagttagccattgatgctggcgctaagctgcttgccagtctcgttaagaagtatgacggtgatgagctgaaagcggccctagcgtacaaccaaggggaaggcccagcgggtgcccctcagctccaagcgtacgacaagggagacttcaggtctatctcggaggaaggtcgtaactacatgcgcaagctgctggatgtggccaagagtccgaactcaggcgcgctggaggcgttcggtggtatcaccccaaagggtaaagggattcccgcagaggatgccttcaagggcatcgctaagactggtaaggtaggtactgagctgccggagtcccatgggttcgacgttgaaggtgtagcgcaggaagcgcccaacacgccatacgctaaggacttctgggagaagaccgggacgactctcgatgaatataacgctcggtcaaccttcttcgggttcggtgacgctgctgaggctcaacttcagaactcaaccttgggtgtggccttccgtgctgcgcgtgctgatgatgggtacgatgtgttcaaggacacgatgaccccgactcgctggaactcttacgtcccgtccaaggaggacttacagaagctgcgggactccgggttacctccgagttactacggtgtggtgactggtggtgacggtgagaactgggatgcgctcatcaagctggccaaggataactttgaggctgaccaacgggccgctgaggctggtactggggcgaaactcgctgctggtatcgttggtgctggtgtagacccgctcagctatgtacctctggtcggtgtggccgggaagggactcaaggtggtcaataaggccctgcgagtaggtgcacaggctggagcactcagtgttgcctctgaaggtatccgtacgtcggtagctggtggtgaagcccactacgctgatgcagcactcggtggattactgttcggtgctggcatgtcggcgctcagtgacgctgtggcggctggtatccgtaaggctcgtggagtcgagtctgtgaatgagttcgctggtccggcactccgtatggaagcacgagagacagccataaacactggtggtcacgatacctctacactacctccagataacttctcgttcgagcagggccacggaggcgttccatttgctgaccacccaaccgaagagggcgcagtggttcttgccaatggttccatcctgagcgacaccaacccgcttaacccaaggacccagcgtgacttcgcagagattgacccagagcgtgcagctcccggtatcaaactcggtgggttcactgagattggtctgaagacattagggtccaaggatgctggtgtacgtgcaatcgctcaggacctcgtacgctctccaacagggatgcaatcagggtctagtggtaagtttggtgcgaccgcttcggacatccatgagcggctccatgcgactgaccagcggatgtacaaccaactgtatgacgctgttgaccgtgccatgaaggacccagagttctccattggtgagcagaagatgtcacgcagagccatccgtcagggagtctacaagcgtgctgccttggcgattgagcgtccagagttacaggctgatttgaccaaaggtgaacgtgaggtgatggacctattgaaagagcacttcgacaccaagcgtgagctgatggaacagccgggtatcttcggtaacgctaacgccgtgagcatcttccccggtagtcgccataagggaacctacatacctaacgtgtacgataggggcgctaaggagctgatgactcagaaactaggcggacctgaaggactccaacaggcaatcgctcagagctggctcaccagttaccgagtgcgtcctgaggttaaggcacgtgttgatgagtacctcatggaactcaacggttacaagtcggttgaccaagtgacacctgaggtggtccagaagcacgctatggataaggcgtacggtatcagccacattgaggacttcacagcgtccagcgtcattgacgacaacatcactggtctggttggtatcgagaacaactcgttcctcgaagcccgtaacatgttcgacagcgacctcccggttaccttgccggacggttcaaccttcagcgtcaacgacctgcgggacttcgacatggcacggattatccctgcgtacgaccgccgagttaacggtgatatctccatcatgggtggtagtgggaagaccactaagcagctcaaggacgaaatcatggcgttagacaagcgggccgagcgtaagggacaactgaagggtgaagtggaagccctgaaggacaccgttaagattctcactggccgcgctcgccgcaacaatgacacagcctttgagacggctatgcgctccttgaatgacctagcgttcttcgctaagaacttctacatgggcccacagaacctcaccgagattgccgggatgttggccaagggtaacgttaaggcgatgctgcatggtatcccaacgttgcgtgacctcgccaccagaacctctccggtttccggtagtgaactccgtgaactccatggggcgctgttcggtaaggaactagaccagctaatacgaccggggcgtgaggacatcgtgcagcgaatccgtgaggcttccgataccagcggggccatggcgtcagtcattggtaccattaagttcggtactcaggagctgtcggctcgttctccttggaccaagatgctgaacggtacggccaactacattctggacactgcccgtcagggtgtgctcggggatgtggctggtgctgcccttggcggtaagggttccaagttcggtaaggagaacttcctcaaagctgcctctatcagtccagagcagtggaagggcatcaagcaactctttgttgaccatgcgactcgtgatgccaacggccagttcaccatcaaggacaagaaggcgttcagtcaagacccgagagcgatggacctgtggcgtcttgccgataaggttgctgatgagaccatgctgagacctcacaaggtatcccagcaggattccaaggcgtatggtgctggtgtcaagatggctatgcagttcaagaacttcaccatcaagtcactcaacgctaagttcattcggtccttctacgagggctacaagaacaaccgtgccatcgacatggccctgacccacgtgttgtctatgggtatcgctgggacttactttgcgatgcaggcccatgtgaaggcttacggactccaagaggctcaacgtaaggactacctgaagaaagctcttaacccgactatgctgggctacgcagcgttgactcgaagttcccatactggtgccccactgtctatcgtttcgatgatggctggtgccgctgggttccaagacgccaacatgctccgctctaccatcctaccgaaggacgaacagttccagaagaaagatggtgcagccaaagggcgcgctgagtccagcgacctcgcgggtaacttagggtctcaggttccagcattgggttacgtaggtaacgtcattgcgaccgccaagaacgcctatggtgttgttacagcacctaacaagccgactgagcgtgactacatgactggcctgatgaactccaccaaggagcttgtacctaacgaccctctcacccagcagctcataatgaaaatctatgaggcaaacggtgtgaccatcaagcaacagcctaaacctaactaattaggtagcactatagggagaccgcttggtttcccttctcattcactttaaggaggtcataatggaccaagacattaaaacagtcattcagtacccagtgggagagactgagtacgacatcccgttcgactacctatcccgtcgcttcgtcagagtgtctctggtctctgaggattcccgaagactactgagtaacatcacggagtaccgctacgtctccaagaccagaatcaaactgctggtttctactgaaggtttcgaccgtgttgagattcgtcggtttacctcagcctctgagcgaattgttgacttcaatgatggctctgtgctgcgagcaacagaccttaacgtatcacagctacagtcggcgcatattgcggaagaagcccgtgatgcagccctgctggccatgcctcaggacgacgcaggtaacctcgatgcacgcagtcgccgtatcgttaacttagctcccggtattgacggcactgacgctatcaataaggaccagttagattcaacgctgggtgaggctggtggtatcctttctgatatgaaagaagtacagaaggaaacctatgactacatcgagaagctcggtgacgacacttcgattgtccgtggggtaacttgggtgtacaaccaagggtctgccgttggtggtgagactactgtactcatcgataaacctacccccacgcttgccgttccttatatcgagattaatggtagtcgccaagaggttgggtatcacttctcgtttgacattgccacccagatgattaccttaacggaaccactggttaccggggacttcctgatggcaatgaccacagagtctagtgtacctctggaagaccttctggctaacccgactggtgcctcggctatcggtacctccgatggtcgaaacgttcaggcaaacatcgacgagcttcgctcagagttagacttcctgaaagacactacggtgctcgacgttcgccgttttggtgctgttggtgatggcattgcagatgattacccggcgtttcagaaagcgtgtatcgctgcgagccaacttggcggggcaatagtccacgtaccgaccccaaaggtaaaatggaagattggattcccggtatacttgttcgaccgaacttgggtccggggtacaggcatcaactgtattgtagagttcactgacccgctgtatgcacgcaagtcccgctctgggttcgtcattgggtctggttacgaacagaaccgcgacaaggccattcagtgtcttaatgatggcacttgggccactactggctcggtggtaaataggggcttcgttgaattggaccgagggcagtacgtacgcgacaaccctagcaaggtccagtcgagactgtgccgagtgtccgggatgtacctgaaagcttcgtacccgaacggtgctaccctgaagggcggctacgctgtgtctggtgccaacgcggtagactcagaggtatttgacatttggggtgaaggttggactgagattatcaacttcgggtctgacgtaccgccagctacgccaagttgtcacaacctccatgcgtacgacatcacgtgtgttgctcctaacgactacgagacgtactacagcgcagggttcattgcgaactctacaagctgctctattggccgattcaagcagctcagggcaatagctgatggttctcctcacggttcctgtggttccatgaactacaccgagtattgctccttctatgatatcgacgtaccgagcttaggccgtacagcctcgtctgagggtatccttgtgaacaactccaagggcgctgtgactcgtaacgttcgtattggtaacgctaagaccggggtggccgagtattacaccactggtgctggtatcttctacgacagagaccaacccaacgtgttcgatagtatccatgcgaataactgtgacaacgcggtagctctccgctccaagttctcggtttggaagaacgtgacgcagaccaactgtacctatcacgtctacttcgggacgaccaacgcacaagcctgtgtggtcaagttcatacctgacacaatcggtggtggtaataacgtagacattctggacagactccgcgacaacgtggttagtggctggcgtgttcgctccctccacatccgccctatcgcctacctactgaacgacaagtcagtattgcgtagctgggatgacggtaagaacatcaaggctgagaacggtgtgggattccagtggttattccctgtaccatctaccatgcgtgcaatcactcaggtcagccaatggtttaccttcgaggttggtgcagcgacggccgggacagaggtcaaggttcaggttcgccgtatgtcagcgtacaacggagacgccaacgagcagcctataatcctctttgagaacagccgcaaggcctctctggataccgtacaagcgactaacattgtggccaactcctcaggtctggtcctgacgtcccctacggatggactggctaacgctgtggatgtcctcgtgagcgttacagcaccgaccgttaacttcaacatgaaagaggctcgcatcacgtatctgggcgactaactaaggagacagtatgttaaacaaattgaatcaacctaaaggctctacaattggtgtgctcaaggatgggcgcaccgtccaagaggcaatcgacgagctggagaagattaagacccgcaacgttgaccctgagcgcttccgtgagacgttgacgtcaagtgacgatgaggtattcgagaagctgttcgagtggttggccactcagtcagacgttgtgggaacctcaagttcttcctatatcacagccttacctcgcatgattgagcttagcggtcgtacctatacgttgactaagcgtcacgtgctggacggtaactttggtatacagaacggtaccatcctgatgtccggtgagggtgagattatcatgggcctcgatgctggtaccaagactcgtcgtcacttccttaagtatgtacatttcgagtacatcggggcatccgaccgcagcacctctctggtcaccatggcacgatgcttcaactctgtggtgctattctgcaacttcattgctggtggtgataccgctcgcaacagagaaccgcgtacccgttacggcctgttcgcagggtccacccgatgctggggcttccagttaatcggtggtgagtattacggtggcgactgtgcgttgcgtgttggacgcgctaacgaccacactgggttgaccattcgtcccggtaccgttcaccactctcgtgttatcaacatgatgttgtgtaacccagcaggtgccgaggtgtctggctgtaacattgaacacgcagataacggtgcgattggcttagggattacgtcaggtacaaacacctccggtaacgcagcccatggagtccgcatcaacggtgtatacttctacaacaacggtaacggctccagcggctcaaacgtagcaccggcgaatatcctcattggtaaggacattccgggtacagaaggttgggaccgaccgggcgagctgattacgtcaagtagaaacactgcgcacagcattacggtgtcagagtgctacatcgttagcccaaacacccagaacgcttggcaggttaacgctctgtacggtgtatccttcttggacaacaaagtgggcctcaaaggtgacgctacgattcacggtgtgtatgacggtacatgtgctaactgctgggcggtcggtaaccgagaccaaggcggcaaggtgttccagttctcctctacggcaaccaacgcgattctgactaccagaaagggtaagtggactccgaagattatcggtgagggcacagcaggtaacacgacgctaagtgcttctggtggtgcgtactctctggataacggaatggtcaccgtgtcgtgcttcgcagtggttgacactaaggacccaaacatggctggcaacctgaacatcaaactcccggtagcctgtgaggaccagcagcggggcggtacaggcatatcgttgacgaacgtcccagacgtgccgagtcctaacggtagcatcattgtgataggagacactgcgcgaatcatgctggggtctgcgagattacagccagcgaacgtcacgactggtaccgccatccacttctcggtatcctacccggcagacgttaaggtataaggaggtaacatgttatccctagacttcaacaacgaagttatcaaggcggctcccattgcgggggtcgctggggccgatggtgtagcgaggctcttttggggcctatcactcaacgagtggttctacgtcgcggcaatcgcctacacagtggttcagattggtgccaaggtagtcgataaaatcattgactggaagaaagctaataaggagtaacatatggacctgattaagttcctcgaaatgttagacactgagatggctcagcagatgctcatggacctgaagaatccagagaagcgaacccctcagctgtacaacgccattggtaaactactggagcgacataagttccaaatctctaagctaacccctgacgttaacatcttgggcggactggctgagggtctggaggcttataactccaaggtgggtgccgatggtcttacagacgacgataagttcaccctacagtgatatactcaaggtactactatatgtagtgcctttatggatgtcattgcgctacgctaggcgttcctacgtgaaatctgagaaacaacgggaggcattatgctggagttcacaaagagaatcgtcccgtatcttgtggctatcatggtgtttgccttcgggtggcacttgggttcgcaatctacggacgctaaatggaaggaggtagtacagaatgagtacgtttcgaagcaaacagctagagttcaaactcaagcagcacttgatgagatatcggctaagtaccaagcagaccttgaggggctggagggcagcactgataggattattgctgatttgcgtagcgacaataagcggctgcgcgtcaaagtcaaacctaccagtgtccccgcaggaccagacggtcgatgcctcgttgatggttccatcgaactacacgaagcaactgctcgaagtcttatcgcaataacccagaaggctgacctcaaagagaaggccctacaggacacaattcgtaagcttcaagggaaaggaggtgaacattgagtaactctcagcaagccaagaacgccttaatcattgcgcaactgaagggtgactttgtcgcctttctcttcgtgctctggaaggccctgaacctgccggaaccaaccaagtgtcaaatcgacatggccaagtgtctggcagacccaaagaacaagaagtttatccttcaggctttccgtggtatcgggaagtcgttcatcacgtgtgcgttcgtagtgtggaccctgtggcgtgaccctcagttaaagatactgattgtctcggcctcaaaggaacgtgcggacgctaactccatcttcatcaagaacatcatcgacttgttgcctttcctgagtgagcttaagcctcgccccggtcagcgtgactccgtgattagcttcgatgtaggccctgccaagccggaccacagcccgtcagttaagtctgtgggtataacgggtcagcttactggtagccgtgccgacatcatcattgcggatgacgtggagattcccggtaactctgcaacccaaggtgcccgtgagaaactctggacattggttcaggagttcgccgcactgttgaaacctctaccgactagccgtgttatctatctgggtacccctcagaccgagatgacgctctacaaggaacttgaggacaaccgtgggtactccaccatcatctggcctgcacagtatcctcgctccaaagaggaagacctgtactatggcgaccgactggctcctatgctccgtagcgagtacgatgaggacaaagagggcctcagtagtcaacctactgacccggtgcgattcgactctatggaccttcaggaacgtgaggtggaatacggcaaggctggctatacactccagttcatgctcaacccgaacctcagtgacgccgagaagtaccctctacgcctccgtgacgctatcgtgtgcggtctacagatggacaaggccccaatgcactaccaatggttgccgaaccgtcagaatcgcaatgaggagcttcctaacgtgggtatgaagggtgacgagatttactccttccatacagcctccagcaacactggtgcgtatcagggtaagattctggtcattgaccccagtggtcgcggtaaggatgagactggctggtgcgtactgtacaccctcaacggttacatctacctgatggacgctggcggtactcgtggttacgaagagaagtcccttgagttcctcgccaagaaagccaaacagtggcaggtgcagacagtggtcttcgagagtaacttcggtgacggtatgttcggtaatgtgttccagcctgtgctcctgaagcatcacccagcgcaactcgaagagattcgtgctcgtggtatgaaagaggcccgcatctgcgatacacttgagcctgtactagcaagccaccgcttggtaatccgtgacgaggtcatccgacaggactaccagacagcacgtgatgcagacggtaagcacgctctgaagtacagcctgttctaccagatgacccgtatgagccgtgagaagggcgctgtggcacatgacgaccgacttgatgcgttagcattgggtgtcgagttcctacgctctacgatgcagcaggacgctgtgaagatagaggctgaggtacttcaggagttcttggagcaccacatggagaaacccctgagtaacatctcacagttccgagccaccagtagcaacggtgtggacatccggtgggaagacgatgggggtgacactatgttcatcgcatggtaactatgcagtgattgtgcataaggattcattaggccaaggaaggccacttttggaaaactctaagcataacagacacttggaattaggtagcactatagggagagacccaaggttacatactataagactacttaaagtttcattcatatagatatgcactttaagtctcctctatgagagatggtagtgatgataatatcaccctctaactataagacactaagagccaacacaaggaggacctatgcgcttactgttaaccttactgcgccataggactacttggcgatttctgctggtacttgctggtgcccttggggcttcactggttactcagcagcaactcagtggactggagactatcgtgtgctctctactcacttgtagcgattagggtcttcctgacgcgctagggattccgtagtgatgcttatcagcatacaccactccatccctctatagtcaatacttaaagttaaccttaggtgattcactgggtctacctacgttaaccttaggtgattcactgggtctacctacgggtctatgcaatgacctgaggactacctgaggttacctttaagaattttacataaagttctgagtgtatatctcacagtttacacttttggttatccccccggtaccctctcagttcaccaaaagtaaccataggccaccctaaaccttcggtttaaccttaggtgggactgatgggaaaccttgggtgatactatatgttgtggtgagtgggaccttgggatactatatgttgatgtctctatgtccc

SEQ ID NO: 11 - DNA, 40758 bp, Unknown
  source: /note="Description of Unknown: KP3W-P0111 Bacteriophage sequence"
tatctgttgaccctctttaagtatccactagtcacacctgaggtaataccggagaccatatataccttaggttaacagtgagtcatcaggtgagccatcactatagggctattgggcagtcattattaattcaccattcaattaggtatcactatagggagacacttaagtattactaagagaccatcaccataaagataactatcactataggtctacataaagtttaacttaagtattgacattcagaatccgttatgagacattaacaaccgttgagagacacaacgtcaccaacgaccagacaataccacgagttatctggttagactgagggtctcaagtagtcatcaaccggacatacgaaagtggttgactcaacgatgaacaagtagtaagatgcaccacagattcacagcaacgaagtatcgctaggcaactagcattgctctttaacaatatggattagtcgctgatatgtacatcactcatcacttagtgtttagctagtggtcacattcaggtctctggcaaggtacgtcctgtcatcctgagagtggccacgctgataaccactaatcaactgaaggatatacaccatggaaatcgtaatgcaggcactgaaccacggggtcattatgacgacagcacgggactacaccggggccaccaaatacatggtgcaatacggcttgcagttcacggtgtttgactcattccgcgaggcactgcaagattacacagattgcgtcacccactcgcaagagtgtggcgactagcggttaacgacaggtcatccgagaggtggcctgaaagataaccactaaccataggatatacaccatgattcacacgaaagaaccagccaacaaggtatttgtattcgttaccgcttaccgtgggtacgagtcactcgaagttaacgagaagatgctcaagggtctcattcgcaccattaagacctatccgggagcgtatggcaacattcgtgatgagaacgtacaaggatgctttaaggaggctggtatgcctgaggcaacgcaagagcgcacgcttaaggtggaatgtaccatcaaacaagcggctgagctggcgtggctggcgtgtaagacctaccatcaagacgctgcactagtggttaactcacagactcacacggcctctctgtggtctatcgaggacgtaggcgaatatcctcaggtatatccacgcttgaaagaggtgtctttaggtggcacgctgcaacaggttgatgcacctaagggtgaatgctattcaatcatcgacggccaatactgggaggttgtatgaagcgctacggaatcacgcagcaggacctcaagatcactcgcaaggccatgaaggtggccctgatgtatgtcaaccagtcacctgaagacatgaacgcatggcacggctactatatggcccagctggcagcaatttatcatactcgtaaactaatgtatgctaaccctgttcgtaattagcgtgtacgccctgattgtcctgtactttgtgcgggactttcgcaagggtctcaaggtacacaaagcatcattcagttacctgaagtggggcttcttgcctcgctttactgtacgactacctaatggccgctttaaggcaaacaaggtaggcattttctacatcgcaacccattgacacgtcataaggaatcaacctaatgaactacaccgatatgcaagaacgcttagacgccatccgtaacctgccaatctgtgaactcgacaagcgccagccgctgctggtagcactcatcgcggacattgtgaactatgagacgtccgatggtgacgatacggacagcgattggggtcttgaacgtcaggactattggcaaaccctgaagattaaggccaaagatgctgggtttaacctgctgggcaatggccacttcagcgcagcgtttaagcacgagctgctaccgggtagggtcattaaggttggctttaagaaagaggactcaggggccgcctacgtggctttctgtcggatgcatcaaggtcgggtagggattcctaacgtctatcacgtagcgcgcaacgctggctgctatacggtggtactggatgagcttgagccttgtcaacgcttcgagaacgaggcgcacgagcattacgcagaccttgcgagctactttgtggagaactctggtgcagagttgggcgatgttgacggtgcagagaaggaattacccttcgtcgagacgtgccaaatgattaacaagttcttccacgggattgcatcctttgacatgcatagtggtaacatcatgttcaccaaagacggcaagccagtgattaccgacccggtgtcattctcagcggaccgggaccgtgagcctttctcgctggaacctgaggaactgctcgcagagattgagcagatagcgcacgccaagatgattgaacgctgtaagcgcaacaaggctaagcgtgacccgaacggggagctgcgcatcgcacgccgtaaggccaataaggagcgtcgagcatgccgtaaggcacacgctaggtggcgcaaggagcgcgagcggattaacgccgaggccctaaagttcaaccttgcgaaaatcgaggaacgagtacatgcatggatggctcatgagggtctagccattcagcagggtagaggccttccggttgacaactaccttcagggtagacttatgggttagcaaggtgtatcttaggtgtctctcacgcaagaggcaccaatagataaactttattaacgccagttcgctggcaccaaagaggcacataatgaacgcattaaacattgcacgtaatgacttctcagagattgaactagccgctatcccgtacaatatcctcagcgagcactatggggacaagctggcacgtgaacagctggcccttgagcatgaagcgtacgagctgggcgagcagcgtttcctgaagatgttggaacgtcaggtgaaagctggcgagttcgctgacaacgtggccgctaagccgctggtcttaacgctgcatccacagttaaccaagcgtattgacgactggaaggaggagcaagcaaacgctcgcggtaagaagcctcgcgcatactacccgattaagcacggtgtggcctcagagttagccctaagtatgggcgctgaggtgctcaacgagaagcgcggagtgtccagtgaggcaatcgcactgctgaccattaaggtcgtcttagggacgctcacagacgcctctaaggccaccatccagcaggtgtcctcacagttaggcaaggcccttgaggatgaggcccgcttcggtcgtatccgtgagcaggaagccgcctacttcaagaagaacgtagcggaccagctggacaagcgcgtaggccacgtgtacaagaaggctttcatgcaggttgtcgaggccgatatgatttccaaagggatgctgggtggtgacaactgggcgagctggaagaccgacgagcagatgcacgtggggaccaagctgctagagctactcattgagggcactggtctggtggaaatgaccaagaacaagatggccgatggctccgacgatgtgaccagtatgcagatggtccagctggctccggcctttgtggaactcctgagcaaacgagcaggcgcactcgcaggtatcagcccgatgtaccagccgtgcgtagtccctccgaaaccttgggttggaactgtgggtggaggctactggtcggtcggtcgtcgccagctggcactggtgcgtacccactccaagaaagcactgcgccgctatgaagacgtgcacatgcccgaggtatacaaagcggtcaacattgcgcaaaacacgccgtggaaggtcaacaagaaggtactggcggtagtcaacgagattgtcaactggaagcactgcccggtgggtgacgtcccggcgattgaacgcgaagaattaccaccacgcccggacgatatcgataccaacgaggtggcacgcaaggcttggcgcaaggaggccgcagcggtctaccgtaaggacaaggcacgacagtctcgccgtttgtcaatggagttcatggtcgcacaggccaacaagttcgctaaccacaaggccatctggttcccgtacaatatggactggcgcggacgtgtgtacgctgtgagcatgttcaaccctcagggtaacgacatgaccaagggtatgctgacgctggccaaaggtaagccaatcggtctcgatgggttctactggctgaagattcatggtgcaaactgtgcaggcgtcgataaggttcctttccctgagcgcatcaagttcatcgaagagaacgagggtaacattctggcgagcgcagccgacccgctgaataacacttggtggacccagcaggattcgccgttctgcttcctagcgttctgctttgagtacgcaggcgttaaacaccatggcctgaattacaactgctcgctgccgctggcgttcgatgggtcctgctctgggattcaacatttcagtgcgatgctccgcgattccatcggtggtcgtgcggttaacctgctgccttctgataccgtgcaggatatttacaagattgtggccgacaaggttaacgaggtgctacaccagcacgttgtcaacgggtctcagacggtggtcgagcagattgctgataaggagactggcgagttccgcgagaaggtgactctgggtgagtccgtgctggctgctcagtggttgcaatatggtgtgacccgtaaggtaactaagcgttcggtcatgacgctggcatacggttccaaagagtttggcttccgccagcaagttcttgaggacaccattcagccagctattgacaacggcgagggcctgatgtttacgcaccctaaccaagcggctggctatatggctaagctgatttgggacgctgttaccgtgaccgtagtggccgctgtcgaggctatgaactggctgaagtctgccgctaaactgctggccgctgaagtcaaggacaagaagaccaaagcggtgctccgtaagcgctgcgcaatccactgggtaacaccagacggcttcccggtgtggcaggaataccacaagcgcgaccaagcgcgtctgaagctgacgttcttaggtcaggccaacgtgttcatgacgtacaacaaaggggacaccaaagagattgacgcgcacaagcaggagtcaggcatcgcgcctaactttgtgcactcacaggatggtagtcacctgcgcatgaccgtagtgcacgccaacgaggtctacgggattgactctttcgcactcattcacgactctttcgggaccattccagctgacgccgggaatctctttaaggcagtccgtgagaccatggtcaagacctacgaggataacgatgtgattgcagacttctatgaccagttcgctgaccagctgcacgagtctcagctcgataagatgccagaagttccggccaaaggggacctgaatctgcgcgatatcttagcgtctgacttcgcgttcgcctaaggtctccggtaattaggtagcactatagggacccgctctgggtccatatacttaaagacaacttaaagtaaacttaaagaggcacgctatgacttactcaatcgttgtaaccatcttgttaatcgttgtaaccatcttgttcatccggtctgttctgaacgcaaccgacctacagagcactcttagctcaaaggtggaaacacataaacaggccatagagtcagctgtcaccaaggtacgtcgggcagaagaggacagagcgtcatgctgccgaaggttacggcacattgaggacctactggatgctgagaaagacaaggtgacgactctaagtgggcgcatcacaacccagcgtgaccgaatgaagcatctccgtaagcgcaacgatgagttactgaatgagttgctgatggtctccgacctgattcacgttaagttcaccgcacgattacctgacggacagccagtaaagacgctctttaagttaggacttgggccgtgcggtttgcacgttaagtccctccgctggaccgagctggaagaccgctatctgatagaccagctgtgcaccaacggcgagcgtaagcagttcgtctactataagaacgaagtagtaggacgcatcgagttccgccacggcaaggtatgattaggtagcactataggaacatactcaaggtcatcatctggtggccttcatgaatgtccctaacaaccactcaggagcagcactatgtatcagaacacaatcaacttcgagcgcagccgtgaacgtaagcagaccgagggttatatccctaagggccgcaagctgaacaagacgaaacgcggtggaggcgtgaagggttccttccgtaacgcgaagggtgacagcgttgttaaccaagagaaatacttcgtaggagcgtaacaaatggctgggaaaactaaatggcttttcgatgggagtacctcacagtggtcacgattgggtgctaccgagcgtaggttgctagatgaaacgggtttacaggtggtgatggtggacgaccctcttacaaacacggtgctgttcgacatgtatgaaccacacccggatggtgacgtactactgattaccagaagatttagccactggtcaattgactcagcgtcagactggctggcaaaactcatggtagactactcaagttggaaatgattaggtagcactataggcagactcaaggtcatcggattccggtggcctttatgattgcttattgcacacaaactgaacactacacttcggagacatcctcatgatgaacattaagactaatccatttaaggccgtatcgttcgttcgctctgctatcgagaaggcgttggagacttccggttacctcatcgcagacactaagcacgatggtgtgcgcgggaacatctgcgtagacaacacggctaactcagcatggctcagccgggtctccaagaccattccggcccttgagcacctcaatggtttcgaccagcgctggcagaagttactgaaagatgaccgctggattttcccggatggctttatgcttgatggcgaactcatggtcaaaggtgtggacttcaacacggggtctggccttctacgtaccaagtggacaaagtgtggtaacttcgattaccatacagacccgatggccccgctgaaggttccgtttgaactcgacactaagcatcttcaagttgtcctctatgacatcattccgcttgacattatcgagtccggtgatgactacaacgtgatgaccctcctccgccttgagcacgtcaaagtcgccttaccagttctgcaagaccacttccctgaagtcgagtggtgcctctcggagtcccatgaagtttacgacatggacgaactcgatgcgctttatcgacagaaacgagaagaaggtcacgaaggtctggtggttaaggaccctcgtggcatctacaaacgcggtaagaagtccggctggtggaagctgaagccagagaatgaggctgacggtgtagtcgtgggaatcaactggggaactcccggtcttgccaatgagggcaaggtgattggcttcgaggttctccttgagtccggtcgagtggtgtccgcaaacaacatctctcaggcacttatggaagagttcacagccaacgctaaggcacatttcacagtagactgtccggtcaacccttacgagggctgggcgtgccaaatcaagtacatggaggaaactccagacggctctctgcgtcacccgtcgttcgacaaatggcgtggaacagaggaagaccctaccgttaagatgtaattatgtagcactataggagacaacaatatgtccatcaatctgattctaatcatcgtgttcatcctcgcggctatcgtgtggtcaatgaacgacgaaccaccatatagcggaggctaaaccatgcgtttacatttcaataaatccaacggtatcttctcggttcgtcgggaggaccgtagcactgtggcggcttctgagcgtcacggtaagattccgttcataggtgataccttcgagctggcacccagcgtgcacattttggttactcgcggtctctacgaagtggctcagactaagagccgtcctttcgtacccgtggtggtaaccaagtggccacgccttcgcctgttctgggagcgactcaaggaggttttcgatgacggccaagagtaagcacaaggaccactgcgcatccctgcacagcttccgagcgtgtgactgtgggcttgaacctagccgccttcacacaggcgactgtaagatatggaacggcgctggtcagtgtacctgcgagcagacccgagacgatggtgtcaagcagcccagccactaccagctgttcgaaggcgtggaggctatcgaggtgattgctcgcagcatgacccaagagatgttcaaaggttactgccttgggaacatcctcaagtaccgactgcgggcgggcaagaagtccgagctggctaccttagagaaagacatggcgaaggccactttctatctggagctgtatgcaaaatataaggggtcgtgtcatgattgaattaacaccgagtagaattaaaatcctgaaaatttgggccaatgatatactaagaatctatcaaactgaggacttcaccaaggaggagcttgagttcatagaggagattttagagaatgaacccgagtgaatgggcaagaaggatgtacgagaagacgctcgaccctgcgtacatcaccctgtataacatgtggaaggagcgagaagatgcaaaagttcgtcataacggtcgagacagctaacgcatcgtacgaactcccggtacacgctgggtctcttgaggaggccctagaagttgccgaggcggagtacgaagagttaggccaagtgactcgggtacgcccagatagtcattaggtagcactatagggacacaggttgtccctcttactgtttaaacttaaaggagattcatcatggcattcgctaagaagaagatttataccaccaagattggtacctgtgagccgtatgcttacttcaacaagccggactatggcggtgagggttttgagaacccacgcggtacctacaaaggttccgtaacgttcaagaacgaagactgtcaggagctggtagacctcattgttaagacccatgaggaaaactacgcggcacgtctggaagcacacgaagctaacccgccgaagtttcagaagggtaagaagcccctgaagccgtacgaaggcgacatgccgttcttcgacaacggggatggtaccaccacgttcaacttcaagtgctacggttcatacgaggacaagaagactggcgagaccaagaagattgttctgggtgtagttgacgccaagggtaaacgcatccaagacgttccgattatcggtggcggctccaaagtgaagattcgcttctcgctagtaccgtacggatggtctgcggtagctggcgcttccgttaagttgcagcttgaaggcgtgatgctggtcgaactggctacctttggtggtggtggtgaagacgactgggctgacgaagccgtagaaggcggttacgaagctggcgaacctcgcagccgtaaacctcaggaagacccggaaaactggtctggtgaggaagagtctgacgagggcgaagccgaagaaggtgatgacttctaatggctggctatggggccaaagggattcggaaggtgggtgccttccggtctggccttgaggacaaggtgtccaagcagttagaatcaaagggcgtcacgttcgactatgaattgtggcgcatcccttacgttattcctgcgagtgaccacctttacactccagacttcttgctgcctaacggtatcttcgtggagactaagggtctatgggaagccgaggaccgcaagaagcacctactgattcgtgagcagcacccggagttagacatccggttggtgttctcttcgagtcgcactaagatttacaaagggtcgcccaccagttacgctgagtggtgcgagaagcataacatcttgtttgccgacaaattgattcccgtagactggctgaaggagccgaagcgtgatgtaccgttcggtaagttcaagcagaagaaaggagtaaagtaagtatggctaaggttcaattcactaagcgacaggagacctctcagattttcgtgcactgttctgccactaaggcaaccatggacattggtgtccgtgagattcgccagtggcacaaagagcagggctggctggatgtagggtatcacttcatcatccgccgtgatggtaccgtagaggcgggccgtgaccaagatgctgtaggttcacacgtcaagggctacaactcgacttcggtcggtgtgtgtctggttgggggcatcgacgctaagggtaaccctgaagcaaacttcacgccagcccagatgcagtctctgcgctcactgctggtagaaatgaaggtgcaatactccggggcagtgttgatggcacaccacgatgtagcaccgaaggcttgcccgagcttcgacctgaagcgctggtgggagaagaacgaattggtcacttctgaccgtgggtaaacattaggtagcactacagggagacaattacgtttccctgttgtcgcttgaggagattactttatgagcaagttcaaagaacactttgacccaatcccgttcctagcgtatggactgctgggattgtgggcgctgtccttcgtgggctcgtttgtcatttcgtgcatcaacggtacatcgttatgagttacggagacagtcaagaagatggtcaggagagtatcttcctgttccacgctccgtgcgaaaactgtggttcttctgatggtaactcagtgtactctgacgggcacgagtattgcttcgtgtgtcaacaccgggttcccggctcagaggaacgtaccgaaaagttatcatcgagaagacccaaaggagggaattacgggatgaatacacaaggttcaggcttattggtattcggcgagagtgacggtcggtacactgacctgaccgctcgtggtatctcaaaggcgacatgccagaaggctggctattgggtcgccaaggtccgagggactgcctatcaggtggctgactatcgggaccagaatggctccattgtctctcagaagctgcgggacaaggagaagaacttctctacccgagggtctcataaaggggacgcactgttcggtaagcacctctggaatggtggcaagaagattgtcatcaccgagggtgaaatcgacatgttaaccgtgatgcaacttcaggattgtaagtggcctgtggtttctctcggtcacggtgcgtcagccgctaagaaaacttgcagtgcaaactacgagtatttcgatagcttcgaccagattatcctgatgttcgacatggatgaccccggtcgggcagctgttgaggaggccgctcaggttctccctcccggtaaggtacatgtagcggtgctgaccgagaaggatgccaacgagtgtttactcaaaggtaagggcaaggaagttctcgaccagatatggaacgcagcaccttgggtaccagatggtgttatcggtgcgatgtccatgaaggaccgagtgcgcgaggccatgaccagcgaacaaagcgtcggataccttttctctggatgtccgggactgaatgaccgaaccttgggtgcacgtggtggcgaagtcatcatggtcacttctgggtcaggaatgggtaagtctacgttcgttcgccagcaggccctagggttcgccagaggtcaaggactgcgggttggcatggcgatgcttgaggagtccgtagaggagaccatggaggatgtcctagggattgccaacggcatccgcttacggcagcaacctcgggagttcaagcagaaactgatagaagacgggacgtatgacaaatggttcgatgagctgtatggcaccgaccagttccatctctatgactcctttgcggaagctgaggtggaccgcttgctggccaagttgcactacatgcgcacagggttaaactgtgacgtaatcattctggaccacatctcaatcgttgtgtcagcctctgaggaatccgatgagcgcaagatgattgaccgactcatgaccaagctgaaagggttcgctaagtcaaccggagtggtacttattgttatttgccacctgaagaacccggagaaaggtaaagctcatgaagaaggacgtgctgtttccattactgacctgcgtgggtctgggtctctgcgccaactctctgatactattattgcacttgagcgtaatcagcaagggggtatgcctaatcttgtcctccttcgtattctcaagtgtcgctttaatggtattggcgttggcattgcggggtacatggagtacaacgaaaagaccggactccttgaaccgtctagctacactggcggcgatggagagggtcattctggctcgggtggagttggaggaactggctgggaaggccacgaagaagacgactattgaaccagactggaagttaacaacacaatgtaattgcccatgggatagaccgtgcgtctgtcctgaccgggcttaatcaacctgaggagaaccatcatgtttaaacttatcgaagcattaggctgtctggtcatcgcactgtatgtacgtgaagccaaggcattggacaaagcgtccaaggtggaagcggaagcggcagctaagctggctaaggcagcagacaaggcacgtcaggcatctctggatgcaaccgcagaggcagcgaaagttgcacttaaagctcagaaacttaaggagttcttctaacccatggatatttacgtgctagtcggtatgcttattggcatcctgctcatacacctatcaacataaggagttcttctaatgactaccaaagctaaattccccggcaataccattcagctgtcagacactgtagaccagtggggtcgcaaggttcacatcaacgttcgcaacgacaaggtgactctggtctaccgctggaagtctaagagcgataaccgtgcgcacactcagcgcgttaccctcgacgatgttcaggcagctcgactgctggcatccgtagccgtagcggcgactgtggctgtgggtgaagacaaggtgcgtgaggttatcctgagtaaagaggtaggctcaacagcagcccgactggctgaagcgtcagaagctaagtgataaactcaaggtcattactatatgtagtggcctttatgattatcatacacaacatattgagaggacataaccatgcgtaaacctgaagaaatccgtgcagacatcgagaagctgaccaaagagctggaagctgttaagattcacgagtccagacaggttgctgctgttaacatcttgtataacttagggtggacacacgaccctcacaagggctggcagaaacctgcgccaaaatggagcgactacaaggccccactgaaggctggcgagctggcaacgttggaggatggtgcacttggtggaaccgtgtatatccgcagcgtcggcaacaaattctcacaggtgtcccacgtccgtggcgtcagtcgtcttggtgctgacgtacttacgggcagcttcgcaattgagaacagcaagttaaccgtgcgtcctcgtgagtatttcattgggcgtcgttaagtaacaggagaccattatgttagtatccgatatcgaggctaacaacctcttagagaaagtcactcagttccactgtggggtcatctatgactacagtacggacgagtacgtatcgtatcgaccttgggacttctcagcgtatctcgatgcgttagaagctgaggtggctcgtggtggtctcatcgtattccacaatggtcacaagtacgatgccccagtgttaaccaagctggccaagctccaattaaaccgagagttccaccttccgcgtgagaacgtagtggacacgttggtacttagccgtttgctttttgcgaacatcaaagattccgacatggccctgctgcgttccggtaagttacccggtaagcgcttcgggtctcacgctctggaggcgtggggttaccgcttaggcgagatgaagggtgaatacaaggatgacttcaagaagctccttgaggaacagggagaggactatgtggacggtgctgagtggattagcttcaacgagccgatgatggactataacgttcaggacgttgtggtgaccaaggcgctcttagagaagttgctgagtgacaagcactacttcccggatgacgttaactttaccgattgctgtactgatgccttttggtatgattcctgcgaggccgtctggctggagcacagagctgcgtggttgctcgctaagcaggagcgcaacggattcccgttcaacaccaaggccattgaggaactctacgttgaacttgctggtcgtcgttctgaactccttcagacactcaccgacactttcggaacttggtaccaacctaagggcggcactgagttattcctgcacccgcgcaccgggaagcctcttggtaaatacccacgagtgaagtatcccaagcagggtggcatctacaagaaaccaaagaacaaagctcaacgtgagggtcgtgaaccctgcgagctggacactcgggattacgtagagggtgctccgtacacaccagtagagcacgttgtgtttaacccaagtagccgagaccacattgcactcaagctgaaggaagccggatggatacctacagagttcaccgacaagggtgcacctaaggttgacgatgaggtccttgagcatgtgcgtgtggacgaccctgagaagcagcgctgtatcgacctcatcaaagagtacctgatgatacagaagcgtatcggtcaggcagctgagggtgacaaagcgtggctacgttacgttcaagaggatggtaaaatacatggttcagtcaatcctaatggtgccgttacgggccgagcgactcacagcttcccgaacctcgggcaagtaccgggtgttcgaagtccttacggcgagccttgcagggctgcttttggtgctgagcatcaccttgatggcctcactggtttaccttgggtacaagctggcatcgacgccagtggtctggagctgcggtgtctcgcccacttcatgtccaagtacgacgggggagcttatgcagatgttattcttaacggggacatccacacagtaaaccagcaggctgctgagctgcctacacgcgataacgccaagacattcatctacggcttcctctatggtgctggtgatgaaaagattggacaaatcgttggagcaggtaaggaacgcggaaaggaactcaagaagaaattccttgagaacaccccagcaatcgcagccctgcgcgaaggaatccagcagaccctagtcgagtcatccagatgggttgccggagagcagaaagtcaagtggaaacgtcgttggattaagggactcgatggacgtaaggtacacgtacggtcaccgcatgctgcactcaacaccctccttcagtcagcgggcgcgctcatttgtaagctctggattgtcgagactgaagagttacttctcaaagctggattaaagcacggttgggatggtgattttgcgtacatggcgtgggttcacgatgaaatacaagtggcctgccgtaccccagagattgcacagcaggtgattgacattgcacaacaagcgatgcgtaacgttggggaacactttaagttccgatgccgtctggatacagaaggtaagatgggtccgaactgggccgtatgtcactaatactatacaggagatttatcatggctatgactaaacgtgtgcgcgtaacatttgactctaagtttgtagcaggtacgaatgatatcaacgagttcgctaagacacttgtgagctactctaagcgcttcatggagggtgataataccctaaaaggcgaccagctggctcttgcagagatggcggcgaaggaaggcgtagaggctgctgtggaactgtctatcaaaatgtcctactcaaaagctatcaagagtgaactagctgacgactgcgtgacagtctccaacattcgaatggagattaaacagtgagcgagtacctaaaagttctggcggccctcaagggctgccctaagtccttccagtcgaactacgtgcggaacaacgctgcgttagtcgctgaggctgcgagccgtggtcacatttcgtgtctgaccatgagtggtcgtaatggtggcgcttgggaaattaccagtgccggagtgaaattccttaagacccatggaggttgtttatgaaggactttttaggccaagaggtatcagtaggtgaccgcgtggtaattacctcgtatggtggctacgggctgtctaaaggtaccattgagaagataaacccaaagaccgtagtggtgcgcacaagtcccggaaagtacgggacaactcgtaagggacccgagtatttcgtaaagattcaggaggtgaccagtgagtaagcgaatggtgttcgtacatccgttgcaacctaaatcacactggaaaactgctggtggcatcgtctggttttataaggatggctacatgctacgacagtcccatgtcacccacaaggaccttcacgacccgaagatggggtttaaattcaaggagttaacgaatgagtaagcacacattgttatccttcagtgactaccgggcgacccagaagattaccaagggtgtccttgtgatggatggtgactggctggtattccaagccatgagtgccgctgagttcgatgcctcgtgggaggaggagatttggcaccgttgctgtgaccacgctaaggctcgcgagattctggagaactccattgaatcctacaaagggcgcaagaaggcgtggaagaatgcagacgttgtcctagcgttcactgaccgtgtcaactggcgtaagctgctggtggacccaacgtacaaagagaaccgagctgtcactaagaagcctgtgggttacttcgagttccttgagtccgtctttgagacctacacgtgcgtccttgagcctcagctcgaaggcgatgacgtgatgggtatcatcgggtctaaccctctcgtgtataactacgagaaggccgtgctggtctcctgtgacaaggattttaagaccatcccggattgtgatttcctgtggtgcacgactggtaacatcctcgttcagactcaggagaccgctgactactggcacctcttccagactatcaagggtgacatcaccgatggttacggtgggattcccggatggggtgataccgctgaggacttcctcaaggaaccattcattgtggagcctgtaacgtccgtactgaagtccggtaagaacaagggccaagaggtaaccaagtgggtgaaacgcgctcctgagccgggagagacgctctgggactgcattaagtccattggggccaaagcagggatgaccgaagcggaagtaatcaagcagggccagatggctcgcatcctccgttctgatgagtacaacatcgagactggggagattactctatggcaaccgggcagttaattctcatcgtcctgaccatgggcttaatagctcgtggtctctggatgttggccttagttatcaagcagatagctgaccacaagcgcaagtgataaactcatgggcactaattaggtagcactatagggaagtgcccattatgattattacttaaagattacttaaagaggagactcaaatgttaaaacctatagagcatatccttaacaatcctaatgaccttcctgacgtaccgcgagctgtcaaggagtacctacagtctcgctacaatgctgacttcctgtatcaatcagaggtccgtaagctgcgtgaggctggccacagcgaggagttcatctccggggtactgtacggtcactacatggcttctcgtgtccttgacgagatggagggacgccagcgtgcactcaaagaaggagattgattatgtgtttctcacctaagatgaaagcacctaaggttgacacaacgactgtccctgagccagctccgctaaccgaggaacctaagggtgtccagtatggtggcgacgaagactcaaacagcaccactcctgaggtgtcagggcgtaagtcactcaaggtgaccaagacgaccgagcctacagggtccgtcagtaaaatccgtaagtcagctttaggaggctaacatgggactgttcaagaaaatcaagaaggctatctccaaggtagtcaaagcgccactcaaggccgtgggcctggcagcagatgcacctaacgtgcagacagccgctgagacacctgtggccgcacctcaggaagcaccaaaagaggtcgtggaggacgttgagtcttcagcagacaccgagtctggaaggaagaaatcccgagcgtctggcaagaagtccctctcagtttcccgcagctcgggcggtgggattaacttatgattggttacggggagggctaacaaatggcagaagttaaactcgaaggcttcgcagaggagggagccaaggcggtatacgaccgtctgaagaacgaccgacagccttacgagacacgagcagagtcctgtgcgcagtacacgattccctcgctgttccctaaggattccgataacgcatcgactgattacacgactccgtggcaatccgtaggtgctcgcggcctgaacaacctagcgtccaagctgatgctggccctgttcccgatgcaatcatggatgaagttgaccattagtgaatacgaagcgaagaaccttctgggtgacgctgagggtctcgctaaggtcgatgagggcctctcaatggtagagcgaatcatcatgaactacatcgagtccaacagttaccgagtgactctctttgagtgcttgaagcaactgtgtgtggctggtaacgcgctgctgtacttaccggagcctgagggttatacccctatgaagctctatcgactgaactcgtatgtggtacagcgagacgctttcggtaacgtactccagattgtcaccctagacaagattgcgtttaacgctctccctgaggatgtccgcagccaagtggaagcagcccaaggtgagcagaaggaagacgctgagattgacatctacacccacgtgtatctgaacgaagccggggatggttactcgaagtacgaagaggttgccgaagaggtagtaccgggcagcgaagctgagtaccctctcgaagagtgtccatacattccggtccgtatggtccgcatcgacggtgaatcctacggacgttcctacgtggaagagtatctgggagacctcaagtccctagagaacctccaagagtctatcgtgaagatggcaatgattaccgccaaggttatcggtctggtagacccagcaggcatcactcaggtccgccgactcacggcagcacagtctggtgcgttcgtaccgggccgtaagcaggacattgagttcctccaattggagaagtccggtgactttaccgtagcgaagaacgtaagcgacaccattgaggctcgcctctcgtatgcctttatgctcaacagtgcggtacaacgtacaggcgagcgagtcacagctgaagagattcggtacgtggcttcagagctggaagatacccttggtggtgtctattcgattctctcgcaggaactccaactacctctggtacgagtgctcttgaagcagctacaagccacgcagcaaataccggagttacctaaagaggccgtcgagccaactatcagcactggccttgaggctatcgggcgcggtcaggaccttgacaagctggagcggtgcattaacgcatggtctgcccttaaggctctcgaaggtgatgatgacctcaacttggctaacctcaagttgcgcatcgctaacgctattggactcgacacagctggtatgctgctcactcaggaagagaagaacgcccttatggcacagcaaggtgctcagattgctacacagcaaggggccgcagcattgggtcaaggtatggccgctcaggctactgcaagtcctgaagcaatggccgcagcggctgattcagtcggtatgcaaccgggcatgtaattaggtagcactatagggagacgcatccagattgagtgaggtctggtctgaaggttcgagtccttcgtgttttcccctcttagtcttaactttaaggagattgaaatggctggcgaatctaacgcagacgtatatgcatccttcggtgtcaacagtgctgtgctgactggtagtacacctgaggagcaccaagaaaacatgttggctcttgatgtttctgcccgtgatggcgatgatgcaatcgagctgaacaccaacagtgatgacccgtatggctccgatgtggacccgttcggtgaacctgaagagggccgtatgcaggtccgcatctccgctgacggttcagacgaagagtctaccgaaggtgaagagggttctgaagaagaacagcatggcgacgaagggagtcagccggaggaagtaaccgacgatggcgaacatgaagagttcaaaccgattggtgaaactccggctgacatcaacgaagcctctcagcagctggaagaacacgaagctggctttaacgacatggttgccactgcaatcgaacgcggtctctcacaggatgctgtgacccgtattcagcaggagtaccagaacgaagacagtttgtccgatgagtcctaccgagagttggccgaggctggctacagcaaggcgttcgttgatgcgtacattcgtggtcaggaagctctggtaaaccagtacgtagaaaaagtgatggacttcgtcggtggccgagagcgcttccagcaggtctatggtcacatgaagaccaataaccctgagggtgctgaggcgctcatcaaggcttttgagtctcgtgacgtagccaccatgaagacgattctgaacctagcgggacagtctcgtgataaaacctttggtaagaaagctgaacgcactattaccaagcgtgcaaccccagcgaaacctgtggcccgtaaggctgaaggcttcgagtctcaagctgagatgattaaagctatgtctgacccacgttaccgcaccgactctaagtaccgtcgcgaagtggaacagaaggtcatcgactctaagttttaattaggtagcactatagggagaccccagcgccgatgcaaggctgggacttctcccttcgagttacacaatgagtatcacctcgtttcaagtagtacctcaaaacatttcgtataaacaacataaggagattcaacatggctatcatgcaaggtggacagcagctcggtactaaccaaggtaaaggtcaatccgcagcagacaagctggcgctattcctgaaagtattcggcggtgaagtcctgaccgctttcgcccgtacctctgtgaccaccaaccgtcacatgcagcgtcaaatcagctccggtaagtccgcacagttccctgtgattggtcgcaccaaggctgcttacctgcaaccgggagagtctctggatgacaagcgtaaagacatcaagcacaccgagaagaccattaacattgatggcctgctgactgcggacgtgctgatttacgacatcgaagacgcgatgaaccactatgatgtgcgctccgagtacacctctcagattggtgaatctctggcgatggcagctgatggtgcggtactggccgagctggccggtctggttaacctagctgattccgtcaacgagaacatcgctggtctgggcaaaccgtccctgctggaagttggcgctaaggctgacctgactgacccggtcaaactgggccaagcggttatcgcacagctgaccattgctcgtgcggctctgaccaagaactacgtcccggctaacgaccgtacgttctacaccactccagacgtgtactctgcgattctggctgctctgatgcctaacgctgcgaactatgcggctctgatcgaccctgagcgtggttctatccgtaacgtgatgggcttcgaagtcgtcgaggttccgcacctgaccgctggtggtgctggtgatgaccgcccagacgaaggcgcagatgcgaccaaccagaagcacgccttcccggcaactggcggtaaagtcaacaaagagaacgttgtaggcctgttccagcaccgttccgctgttggtactgtcaagctgaaagacctcgctctggaacgtgctcgccgcgctgagtatcaggctgaccagattatcgctaagtacgcgatgggtcatggtggtctgcgcccagaatctgctggtgcgctggttttcacggcggcctaagcgtaaatacctttagtgctcgggcggtaactccacctgagtacgaggtacagactgtagccattgatggtgattcacttaaggtggcactcgatgggctggagggagtaacggactggtcaacacttgaggtaacttatggtacttcaggggttgccagccatactcgccggaccaacacgctgtacttcaaaggaatcgctgtaggcgaaactctggtgactgtcagctttgaggggtctgaaaggaagacctttaagctggtcgtgactaactaataagccaaaccccttggggaccactcacggtctctgaggggttttttcgttaggagcttatattatgaacatgcaagatgcttactttgggtctgccgctgagctggatgctatcaacgagatgctcgcagccatcggtgaatccccggtgacaacccttgacgaagatggtagcgcagacgtagcgaacgcccgccgcatcctcaacaggattaaccgccagattcagtctaaaggatgggcattcaatattaatgagtcagcaacattgaccccggatgccagcactggactcattccgttccgtccggcctacctgtcaatccttggtggccagtacgttaaccgtggaggttgggtgtacgataagtcaaccgacactgacaccttctcaggaccaattaccgtgaccctgattacccttcaggattacgacgagatgcctgaatgtttccgccagtggattgtcaccaaggccagccgccagttcaactctcggttcttcggagcggaggatgtagagaactcactggcacaggaagagatggaagcacggatggcgtgcaatgagtacgagatggacttcgggcagtacaacatgcttgacggtgacgcatacgttcagggtctcatcggtcgttaatcagaaacttaaggaggaccaaatggctctcatatcacaatcaatcaagaacctcaagggaggcattagccagcagcctgaaatcctacggtacccagagcagggttcgcttcaggtcaacggttggtcctccgagactgagggtctccagaagcgaccacctatggtgttcatcaagtccttaggaggacgcggatatcttggggaggacccctacattcacctaatcaaccgcgatgaatacgagcagtattacgccgtgtttacagggaacgacgttcgggtattcgacctgtccggctatgagtatcaggtccgaggggaccgctcgtatgtgaccgtcaataaccctaaggataacttgcggatggtcaccgtggccgactacacgttcattgtgaaccgtaccagacatgtccgggagagtcataacctgaccaacggtggcaccttcagagataacgttgacgccctcattaacgttcgcggtggtcagtatgggcgtaagctcgaagtgaacattaacggcgtgtgggtaagccaccagctccctccgggagacaacgctaaggatgacccgcctaaggtggacgcacaggctatcgctgaggccctagcgactcttctcagagcagcacaccctacgtggacgttcaacgtgggaacaggattcattcactgcatcgctccagcaggtaccaccattgacatactggagactaaggatggatacgccgaccagttaatcaatccggttactcactacgtccagagcttctctaagttacctctgaacgcaccagatgggtacatggtgaagattgtcggggacacatccaagaccgccgaccagtattacgttaagtatgacaagagtcagaaggtctggaaggaaactgttggatggaacatctcgatagggctggattacaccactatgccttggacactggttcgcgcagccgatggtaactttgaccttgggtatcatgaatggaaggaccgacgcgctggtgatgacgataccaaccctcaaccatcctttgtgaactcaacgataaccgacgtgtttttcttcaggaaccgcttagggttcatctctggtgagaacattgtgatgtcgcgtacaagtcggtacttcgagttctacccgccgtcagtggccaactacacggacgatgacccactggatgttgctgtgagtcataaccgagtgtcggtcctcaagtatgctgtgagcttcgctgaggagcttctgctgtggtctgatgaggcacagttcgtcctgtcagccaacggtgtgttatccgctaagacagcacagctggacctgaccactcagttcgatgtgtcagaccgtgcgcgtccttatggtatcggcaggaatatctactatgcgtctcctcgcagctcctttacgtccatcatgcgctactacgcggtacaggatgtaagctccgtgaagaacgcagaggacatgacggcccacgttccgaactacatcccgaacggtgtgtatagtattaatgggtcaggtactgagaacttcgcgtgtgtactgaccaaaggtgctccaagcaaggtgttcatctacaagttcctttacatggacgagaacatccgtcagcagtcgtggtcccactgggacttcggggatggtgtggaggtgatggccgcaaactgtatcaactcaacgatgtacatgttgatgcgtaacgcctacaacgtgtggatagctgcggttgactttaagaagaactctacggactttccgttcgagccttacaggttccacgtggattccaagaggtcataccgcatctcagagactgcgtatgacattgagacgaaccagacggtagtgaacgtcaaggacatctacggtgcgtcgttctctaagggtaccgtggcaatctgcgagagtgacggtaaaatcaccgagtacgagcctacgggttcctcttgggattcaaccccggacatccgcattagcggcgacatctccggtaaggacattgtcatcgggttcctgtacgacttccagtatgtgttcagtcggttcctcatcaagcaggagcagaacgacggtacaacgtccactgaggactctggtcgcctacagctgcgcagagcgtgggtgaactatcaggacactggcgcgttcactgtgagcgtcgataacggtagccgtgagttcaactatctggtaaacgccagagtaggctcgacaggtcttcgtctgggccagaaggccacaaccactggtcagtatcgtttcccggtgacaggtaacgcgctatatcagaaggtgtccttgagttccttcaatgcttccccggtgtcgatcattgggtgtggctgggagggtaactacagcagacgcgctaacggtatttaactaaatgtctccctgtggtgccgctcaattaggtagcactatagggagaccacactaagaggggacttaaagcatgtacataagaaacactataagtaatgacttcgagttattcatcccggcctaccatgacgtacttgaggcgcaggccatgggtatagaaccatcgttcccagcggttactgagtgtgtcacgttagaccacgatggttttcctttggctataggtggacactgtggagaccagtgctggttcgtcacgagtgaccaagtgtggagactcgacagggctggcaagctggagttccgtgagagaatcatggagtacagggacatgttattaaatgtttatccatccctgtggaacttcgtgtgggtcggtaatggtccacacaagcggttccttaagtccatcggtgctgtattccacgaggagtacactcagggtgggaagttccaactgttcaccataacgaggaggtaactatgtgctggatggcagctattcctattgcaatgacagcagtacaagccatcggtcagtcgcgcagcgaagccaagatgattggtcttcagaatgaccagatgcgccgacagtctgcccaaatgattaaagagtcaaacattcagaacgctaacgccagccttgagcagaagcagaagctggaagaagccagtgcggacctgaccgctaagaatctcgataaggttcaggccatgggtacaatccgtgcagcaatcggagaggggaaccttgagggtgccagcatggaccgtatcagtcgcatcgaagagggcaagttcattcgggaggccaacgcggtcaccgataactaccgtcgagactatgcgtcactgttcgctcagcagctgggtaactccgagtcaactattgaccaagttaagtccatgcagaaggctgagggcaaaggtaagtccaagctggaacaggtgctggacccgctggccttaatgggttcgcagggtgcctcagcgtatgcttctggtgcattcgacagcaaggggaccaaggctccaattagtcaggcccaaggaactaaggtaggaggtaaataatggccagtaaattagaacaagcattaagccaactaccacaggccgggtctacccgtatccgtggtggctcagcatccatgcagtatcgcccagtgaccattcagcaagaagggttcaggcagtccaacctagtgcagtccttggcgaagtttggcactgctgtgggggaggcagcggatgcctacgacaagcgtcaacgggacaaggccgacgagaggtctgatgagattatccgtaagttgaccccagagcagcgccgggaggcaatcaagaacgggaccctgctgtatcaggatgacccgtacgctatggaggccctacggttcaagactggtcgtaacgctgcgttccttattgatgacgaagtggcacagcgcgttcagaacggtgagttccgtactcgtgctgagatggaagagtatcgccacaaacggttgaccgaaggtgccaatgagttcgctgaacagtttatgattaaccctgaggactctgagttccagagagggttcaacgctaacataaccgagcgtaacatctcactgtacggtaagcacgatacgttccttagcgagcaagctcagaagggtgccatactggcctcgaaggtggagctgtcaggtgtgctaaaagaccctgccgttcttacccgtccagagtccggtgagttcttccagcgctacatcgacaacgcgattaagaccgggagtatccctagcgatgctcaggcacaacaggtcatcattgggtccctcaacgacgtcatccagcgtccgggtgcgaccaacttcttgcagagccttgagggccgtccggtcacccttaacgggaagaccacgacctacaaggaacttatgggagaggagcagtggaacgccctgatggtcaaggcccagtcaacccagttcgacaatgacgctaagttgtccgaaggtttccgccttgggatcaccagtgcgttgaaccaagacgacaccagcaagggctgggagatgcttcagggtgccaaggcagaactggatcgtctgcaacccggtgaacagatgacacccgagcgtgagcgcctgattcaagctgaggaacagatgcaggcccgtttccgtcaggaggcccaagcggcagccaaggagatggacaagcgccagaagaccatcaacaagaaccaagtgattgaccagcagttcaccaagcgtatcggcgggcagtatgtgtccaccagctacaaggacatgccgaccaatgagaacactggcgagttcactcacagtgacatggtgaattacgctaacgggaagctggctgagattgaccagatgcagctcacggagcaacagaaggaccgcatgaagctgagctacctacgggcagactcagagggtggagccttccgtaccgttgtaggccagatggtcaccgacgctgggtctgaatggtctgccgctgtgattaacggtaagttaccagaggacaccacggcgttgaacaagctgcgcaccatgcgtaacaccgacccggacctcttcgctgcactgtacccagacaaggccgacttgttcctgacgatggacatgatggacaagcagggtattgacccgcagattctcatcgacgctgaccgttctcgccgcagtctcaccaaagagatgcagtacgaggatgataaagcatgggcgtccttgaagaacaactcagagtccccagagctgtcccgtatcccagcaagtctggatggtatggcccgtaagatttacgacagcttcaagtaccgcacaggtaacagtgatggtgccatgcagcaggttgacaagtttcttaaggaatctactgtgaccttcaaaggtgatgacatggacggtgataccattggtattatccctaagaacgccctacaggtcagtgatgaccctaagagctgggagcagggccgagacattctcgaagaagcccgtaagggaatcatcgcggctaacccttgggtgaccaacaagcagctgacgatgtaccagcagggtgactctatctacatgatggacaccactggtaccgtacgcatccgctacgacaaggagctactgactcgcacctatcaggaacagcagcagcgactggccaaggaagccgaagagaaggcactgaaggaagcaaccaagcgtgcacctatctccgcagccactcaggcccgtaaggcagctggtgagcgcgtacgtgcgaaacgtaaagccactccgaagttcatttatggaggtggcgatgagtaaacaataaggagacaacatgagctacgacaagtccaaacctagtgactacgacggtatgttccagaaggcagcagacgcacacggtgttagttacgacctactgcgtaaactgtccttcaacgaatcatccttcaaccctaaggccgtctctaagactggccctaagggcatcatgcagttcaccaaagcgacggcccggagcatgggccttaacgtgaccgatggtgatgacgatgggcgctacaaccctgagttagccattgatgctggcgctaagctgcttgccagtctcgttaagaagtacgacggtgatgagctgaaagcggccctagcgtacaaccaaggggaaggcccagcgggtgcccctcagctccaagcgtacgacaagggagacttcaggtctatctcggaggaaggtcgtaactacatgcgcaagctgctggatgtggccaagagtccgaactcaggcgcactggaggcgttcggtggtatcaccccaaagggtaaagggattcccgcagaggatgccttcaagggcatcgctaagactggtaaggtaggtactgagctgccggagtcccatgggttcgacgtagagggtgtggagcaacctgcacccaacgtaccgtacgccaaggacttctgggagaagatcgggacgactctcgacgagtataacgctcggtcaaccttcttcgggttcggtgacgctgctgaggctcaacttcagaactcaaccttgggtgtggccttccgtgctgcacgtgctgatgatgggtacgatgtgttcaaggacacgatgaccccgactcgctggaactcttacgtcccgtccaaggaggacttacagaagctgcgggactccgggttacctccgagttactacggtgtggtgactggtggtgacggtgagaactgggatgcgctcattaagctggccaaggataactttgaggctgaccaacgggccgctgaggctggtactggtgcgaaacttgccgctggtatcgtcggtgctggtgtagacccactaagttatgtacctctggtcggtgtagctgggaagggactcaaggtggtcaataaggccctgcgagtaggtgcacaggctggagcactcagtgttgcctctgagggaatccgtacgtcagtagctggtggtgaagctcactacgctgatgcagcacttggtgggttactattcggtgctggtatgtcggctctcagtgatgctgtggcggctggtatccgtaaggcacgtggtgttgaatccgtgaatgagtttgctggtccagcacttcgcatggaagcccgagagactgccatcaacactggtggtcacgacacctcgacactgcctccagagaacttctcgttcgagcaggaccataggggtgttccgtttgccgaccatccgaccgaagagggcgcagtggttctggccaatggttccatcttgagtgataccaacccgcttaacccaaggactcaacgagacttcgcagagattgacccagagcgtgcagctcccggtatcaaactcggagggttcactgagattggcctgaagaccttagggtccaaggatgctggtgtccgtgcaatagctcaggacctcgtgcgctctccaacagggatgcaatcagggtctagtggtaagtttggtgcgaccgcttcggacatccatgagcggctccatgcgactgaccagcggatgtacaaccaactgtatgacgctgttgaccgtgccatgaaggacccagagttctccattggtgagcagaagatgtcacgcagagccatccgtcaggaagtctacaagcgtgcagccttggcgattgagcgtcaagagttacaagctgatttgaccaaaggtgaacgtgaggtgatggacctactgaaagagcacttcgataccaagcgtgagctgatggaacagccgggtattttcggtaacgctaacgccgtgagcatcttccccggtagtcgccataagggaacctacatacctaacgtgtacgataggggtgctaaggagctggtgactcagaaactaggcggacctgaaggactccaacaggcaatcgctcagagctggcttaccagttaccgagtgcgacctgaggttaaggcccgtgtggatgagtacctcatggaactcaacggttacaagtcggttgaccaagtgacatctgaggtggtccagaagcacgctatggataaggcgtacggtatcagccacactgaggacttcacagcgtccagcgtcattgatgacaacatcactggtctggttggtatcgagaacaactcgttcctcgaagcccgtaacatgttcgacagcgacctcccggttaccttgccggacggttcaaccttcagcgtcaacgacctgcgggacttcgacatggcacggattatccccgcgtacgaccgccgagttaacggtgatatctccatcatgggtggtagtgggaagacaactaagcagctcaaggacgaaatcatggcgttagacaagcgggccgagcgtaagggacaactgaagggtgaagtggaagccctgaaggacaccgttaagattctcactggccgtgctcgccgcaacaatgacacagcctttgagacggctatgcgctccttgaatgacctagcgttcttcgctaagaacttctacatgggtccgcagaacctcacagagattgctgggatgttggctaagggtaacgttaaggcgatgctgcatggtatcccaacgttgcgtgacctcgccaccagaacctctccggtttccggtagtgaactccgcgaactccatggggcgctgttcggtaaggaactcgaccagttaatacgtccgggacgtgaggacatcgtacagagaatccgcgaggcttccgataccagtggggccatggcgtcagtcattggtaccatcaagttcggtactcaggagctgtcggctcgttctccttggaccaagatgctgaacggtacggctaactacattctggacactgcccgtcagggtgtgctcggtgatgtggctggtgcggccctaggcggtaagggttccaagtttggcaaagagaacttcctcaaagctgcctctatcagtccagagcagtggaagggcatcaagcaactctttgttgaccatgcgactcgtgataccaacggccagttcaccatcaaggacaagaaggcgttcagtcaagacccgagagcgatggacctgtggcgtcttgccgataaggttgctgatgagaccatgctgagacctcacaaggtatcccagcaggattccaaggcgtatggtgctggtgtcaagatggctatgcagttcaagaacttcaccatcaagtcactcaacgctaagttcattcggtccttctacgagggctacaagaacaaccgtgccatcgacatggccctgacccacgtgttgtctatgggtatcgctgggacttactttgcgatgcaggcccatgtgaaggcttacggactccaagaggctcaacgtaaggactacctgaagaaagctcttaacccgactatgctgggctacgcagcgttgactcgaagttcccacactggtgccccgctgtctatcgtttcgatgctggctggtgccgctggattccaagacgccaacatgctgcgctccaccatcttacctaaggaggaacagttccagaagaaagatggagcgtccaaaggtcgagccgagtcgagcaaccttgcgggtaacttggggtctcaggtcccagcgctgggttacgtagggaacgtcattgcgaccgctaagaacgcttatggtgttgctacagcgcctaacaagccgactgagcgtgactacatgactggcctgatgaactccaccaaggagcttgtacctaacgacccgctcacccagcagctcataatgaaaatctatgaggcaaacggtgtgaccatcaagcaacagcctaaacctaactaattaggtagcactatagggagaccgcttggtttcccttctcattcactttaaggaggtcataatggaccaagacattaaaacagtcattcagtacccagtgggagagactgagtacgacatcccgttcgactacctatcccgtcgcttcgtcagagtgtctctggtctctgaggattcccgaagactgctgagtaacatcacggagtaccgctacgtctccaagaccagaatcaaactactggtttctactgaaggtttcgaccgtgttgagattcgtcggtttacctcagcctctgagcgaattgttgacttcaatgatggctctgtgctgcgagcaacagaccttaacgtatcacagctacagtcggcgcatattgcggaagaagcccgtgatgcagccctgctggccatgcctcaggacgacgcaggtaacctcgatgcacgcagtcgccgtatcattaacttagctcccggtattgacggcactgacgctatcaataaggaccagttagattcaacgctgggtgaggctggtggtatcctttctgatatgaaagaagtacagaaggaaacctatgactacatcgagaagctcggtgatgacacttcaattgtccgtggggtaacttgggtgcacaaccaagggtctgccgttggtggtgagactactgtactcatcgataaacctacccgcacgcttgccgttccttatatcgagattaatggtagtcgccaagaggttgggtatcacttctcgtttgacattgccacccagatgattaccttaacggaaccactggttaccggggacttcctgatggcaatgaccacagagtctagtgtacctctggaagaccttctggctaacccgactggtgcctcggctatcggtacctccgatggtcgaaacgttcaggcaaacatcgacgagcttcgctcagagttagacttcctgaaagacactacggtgctcgacgttcgccgttttggtgctgtgggtgatggtattgcagatgattacccggcgtttcagaaagcgtgtatcgctgcgagccaacttggcggggcaatagtccacgtaccgaccccaaaggtaaaatggaagattggattcccggtatacttgttcgaccgaacttgggtccggggtacaggcatcaactgtattgtagagttcactgacccgctgtatgcacgcaagtcccgctctgggttcgtcattgggtctggttacgaacagaaccgcgacaaggccattcagtgtcttaacgatggcacttgggccactactggctcggtggtaaataaggacttcgttgaattgggccgagggcagtacgtacgcgacaaccctagcaaggtccagtcgagactgtgccgagtgtccgggatgtacctgaaagcttcgtacccgaacggtgctaccctgaagggcggctacgctgtgtctggtgccaacgcggtagactcagaggtatttgacatttggggtgaaggttggactgagattatcaacttcgggtctgacgtaccaccagctacgccaagttgtcacaacctccatgcgtacgacatcacgtgtgttgctcctaatgactacgagacgtactacagcgcagggttcattgcgaactctacaagctgctctattggtcgattcaaacagctcagggcaatagctgatggttctcctcacggttcctgtggttccatgaactacaccgagtattgctccttctacgatatcgacgtaccgagcttaggtcgtacagcctcgtctgagggtatccttgtgaacaactccaagggcgctgtgactcgtaacgttcgtattggtaacgctaagaccggggtggccgagtattacaccactggtgctggtatcttctacgacagagaccaacccaacgtgttcgatagtatccatgcgaataactgtgacaacgcggtagctctccgctccaagttctcggtttggaagaacgtgacgcagaccaactgtacctatcacgtctacttcgggacgaccaacgcacaagcctgtgtggtcaagttcgtaccagacacaatcggtggtggtaataacgtagacattctggacagactccgcgacaacgtggttagtggctggcgtgttcgctccctccacatccgccctatcgcctacctactgaacgacaagtcagtactgcgtagctgggatgctggtaagaacatcaaggctgagaacggtgtgggattccagtggttattccctgtaccacctaccatgcgtgcaatcactcaggtcagccaatggtttaccttcgaggttggtgcggcgacggccgggacagaggtcaaggttcaggttcgccgtatgtcagcgtacaacggagacgccaacgagcagcctgtaatcctctttgagaacagccgcaaggcctctctggataccgtacaggcgactaacattgtggccaactcctcaggtctggtcctgacatcccctacggatggactggctaacgctgtggatgtcctcgtgagcgttacagcaccgaccgttaacttcaacatgaaagaggctcgcatcacgtatctgggcgactaactaaggagacagtatgttaaacaaattgaatcaacctaaaggctctacaatcggtgttctcaaggatgggcgcaccgtccaagaggcaatcgacgagctggagaagattaatacccgaaacgttgaccctgagcgcttccgtgagacactgacgtcaagtgatgatgaggtgttcgagaagatgttcgcgtggttggccactcagtcagacgttgtgggaacctcaagttcttcctatatcacagccttacctcgcatgattgagcttagcggtcgtacctatacgttgactaagcgtcacgtgctggacggtaactttggtatacagaacggtaccatcctgatgtccggtgagggtgagattatcatgggcctcgatgctggtaccaagactcgtcgtcacttccttaagtatgtacatttcgagtacatcggggcatccgaccgtagcacctctctggtcaccatggcgcgctgcttcaactctgtggtgctattctgcaacttcatcgctggtggtgataccgctcgcaacagagaaccgcgtacccgttatggcctgttcgcagggtccacccgatgctggggcttccagttaatcggtggtgagtactacggtggcgactgtgcgttacgtgttggacgagctaacgaccacactgggttgacaattcgtcccggtactgttcaccattcgcgtgtaatcaacatgatgttgtgtaacccagcaggtgccgaggtgtctggctgtaacattgaacacgcagacaatggggccataggcctagggattacctcgggtaccaatacctccggtaacgcagcccatggagttcgcatcaacggtgtatacttctacaacaacggtaacggctccagcggctcaaacgtagcaccagcgaatatcctcattggtaaggacattccgggtacagaaggttgggaccgaccgggcgagcttattacgtcaagtagaaacactgcgcacagcattacggtgtcagagtgctacatcgttagcccaaacacccagaacgcttggcaggttaacgccctgtatggtgtatccttcttggacaacaaagtgggcctcaaaggtgacgctacgattcacggtgtgtatgacggtacatgtgctaactgctgggcggtcggtaaccgagaccaaggtggcaaggtgttccagttctcctctacggcaaccaacgcgattctgactaccagaaagggtaagtggactccgaagattatcggtgagggcacagcaggtaacacgacgctgagtgcttctggtggtgcgtactctctggataacggaatggtcaccgtatcgtgcttcgcagtggttgacactaaggacccaaacatgactggcaacctgaacatcaaactcccggtagcctgtgaggaccagcagcggggcggtacaggcatctcgttgacgaacgttccagacgtaccgagcccgaatggtagcatcattgtgataggagacaccgctcgaatcatgctggggtctgcgagactacagccagcaaacgtcacgaccggtaccgccatccacttctcagtatcctacccagcagacgttaaggtataaggaggtaacatgttgtccctagacttcaataacgaagttatcaaggcggctcccattgcgggggtcgctggggccgatggtgtagcgaggctcttttggggcctatcactcaacgagtggttctacgtcgcggcaatcgcctacacagtggttcagattggtgccaaggtagtcgataaaatcattgattggaagaaagctaataaggagtaacatatggacctgattaagttcctcgaagtgttagacactgagatggctcagcagatgctcatggacctgaagaatcctgagaagcgaacccctcagctgtacaatgccattggtaaactactggagcgccataagttccaaatctctaagctgacccctgacgttaacatcttgggcggactggcagagggtctggaggcttataactccaaggtgggtgctgatggtctgacagacgacgataagttcaccctacagtgatatactcaaggtactactatatgtagtgcctttatggatgtcattgcgctacgctaggcgttcctacgtgaaatctgagaaacaacgggaggcattatgctggagttcacaaagagaatcgtcccgtatcttgtggctatcatggtgtttgccttcgggtggcacttgggttcgcaatctacggacgctaaatggaaggaggtagtacagaatgagtacgtttcgaagcaaacagctagagttaaaactcaagcagcacttgatgagatatcggctaagtaccaagcagaccttgaggggctggagggcagcactgataggattattgctgatttgcgtagcgacaataagcggctgcgcgtcaaagtcaaacctaccagtgtccccacaggaccagacggtcgatgcctcgttgatggttccatcgaactacacgaagcaactgctcgaagtcttatcgcaataacccagaaggctgacctcaaagagaaggccctacaggacacaattcgtaagcttcaagggaaaggaggttaacattgagtaactctcagcaagccaagaacgccttaataattgcgcaactgaagggtgactttgtcgcctttctcttcgtgctctggaaggccctgaacctgccggaaccaaccaagtgtcaaatcgacatggccaagtgtctggcagacccaaagaacaagaagtttatccttcaggctttccgtggtatcgggaagtcgttcatcacgtgtgcgttcgtagtgtggaccctgtggcgtgaccctcagttaaagatactgattgtctcggcctcaaaggaacgtgcggacgctaactccatcttcatcaagaacatcatcgacttgttgcctttcctgagtgagcttaagcctcgccccggtcagcgtgactccgtgattagcttcgatgtaggccctgccaagccggaccacagcccgtcagttaagtctgtgggtataacgggtcagcttactggtagccgtgccgacatcatcattgcggatgacgtggagattcccggtaactctgcaacccaaggtgctcgtgagaaactctggacgttggttcaggagttcgccgcactgttgaaacctctaccgactagccgtgttatctatctgggtacccctcagaccgagatgacgctctacaaggaacttgaggacaaccgtgggtactcgacgattatctggcctgcacagtatccccgctccaaagaggaagacctgtactacggcgaccgtctggctccgatgctccgcagtgagtacgatgaggacaaagagggcctcagtagtcaacctaccgacccggttcgattcgactccatggaccttcaggagcgtgaggtggaatacggcaaggctggctatacgcttcagttcatgctcaaccctaacctcagtgacgccgagaagtaccctctacgcctccgtgacgctatcgtgtgcggtctacagatggacaaggccccaatgcactaccagtggctcccgaaccgtcagaaccgcaatgaggagcttcctaacgtgggcatgaagggtgacgagatttactccttccatacagcctcaagtaacactggtgcgtatcagggtaagattctggtcattgacccaagtggtcgcggtaaggatgagactggctggtgcgttctgtataccctcaacggctacatctacttgatggacgctggcggtactcgtggttacgaagagaagtcccttgagttcctcgctaagaaggctaagcagtggcaggtgcagactgtggtcttcgagagtaacttcggtgacggtatgttcggtaacgtgttccagcctgtgctcctgaagcatcacccagcgcaactcgaagagattcgtgctcgtggtatgaaagaggtccgcatctgcgacacccttgagcctgtactggcaagtcaccgcttagtaatccgtgacgaggtcatccgacaggactaccagacagcacgtgattcagacggtaagcacgctctgaagtacagcctgttctaccagatgacccgtatgagccgtgagaagggcgctgtggcacatgacgaccgacttgatgcgttagcattgggtgtcgagttcctacgctctacgatgcagcaggacgctgtgaagatagaggctgaggtacttcaggagttcttggagcaccacatggagaaacccctgagtaacatctcacagttccgagccaccagtagcaacggtgtggacatccggtgggaagacgacggggatagctctatgttcatcgaatggtaactatgcagtgattgtgcataaggattcattaggccaaggaaggccacttttggaaaactctaagcataacagacacttggaattaggtagcactatagggagagacccaaggttacatactataagactacttaaagtttcattcatatagatatgcactttaagtctcctcaaaggcagagggtagtgatgataatatcaccctctcactataagacactaagagccaacacaaggaggacctatgcgcttactgttaaccttactgcgccataggactacttggcgatttctgctggtacttgctggtgcccttggggcttcactggttactcagcagcaactcggtggattggagactctcgtgtgctctctactcacttgtagcgattagggtcttcctgacgcgttagggattccgtagtgatgcttatcagcacacaccactccatccctctacagtcaatacttaaagttaaccttaggtgattcattgggtctacctacgggtctgtgcaatgacctgaggactacctgaggttacctttaagaatatgacataaagttctgagtgtatatctcacagtttacacttttggttatcccccccccggtaccctctcagttcaccaaaagtccccccccggtaccctctcagttcaccaaaagtaaccataggccaccctaaaccttctgtttaaccttaggtgggactgatgggaaaccttaggtgatactatatgttgtggtgagtgggaccttgggatactatatgttgatgtctctgtgtccc

SEQ ID NO: 12 - DNA, 40698 bp, Unknown
  source: /note="Description of Unknown: KP3W-P0112 Bacteriophage sequence"
tatctgttggccctctttaagtatccactagtcacacctgaggtcagacctgaggtaaccacctgaggtaataccggagaccatatatataccttaggttaacagtgagtcatccggtgagccatccggtgagccatcactatagggctattgggcagtcattattaattcaccattcaattaggtatcactatagggagacactttaagcattactaagagaccatcaccataaagataactatcactataggtctacataaagtttaacttaaggtattgacattcagaatccgttatgagacattaacaaccgttgagagacacaacgtcaccaacgaccagacaataccacgagttatctggttagactgagggtctcaagtagtcatcaaccggacatacgaaaatggttgactcaacgatgaacaagtagtaagatgcaccacagattcacagcaacgaagtatcgctaggcaactagcattgctctttaacaatatggattagtcgctgatatgtacatcactcatcacttagtgtttagctagtggtcacattcaggtctctggcaaggtacgtcctgtcatcctgagagtggccacgctgataaccactaatcaactgaaggatatacaccatggaaatcgtaatgcaggcactgaaccacggggtcattatgacgacagcacgggactacaccggggccaccaaatacatggtgcaatacggcttgcagttcacggtgtttgactcattccgcgaggcactgcaagattacacagattgcgtcacccactcgcaagagtgtggcgactagcggttaacgacaggtcatccgagaggtggcctgaaagataaccactaaccataggatatacaccatgattcacacgaaagaaccagccaacaaagtatttgtattcgttaccgcttaccgtgggtacgagtcactcgaagttaacgagaagatgctcaagggtctcattcgcaccattaagacctatccgggagcgtatggcaacattcgtgatgagaacgtacaaggatgctttaaggaggctggtatgcctgaggcaacgcaagagcgcacgcttaaggtggaatgtaccatcaaacaagcggctgagctggcgtggctggcgtgtaagacctaccatcaagacgctgtactagtggttaactcacagactcacacggcctctctgtggtctatcgaggacgtaggcgaatatcctcaggtatatccacgcttgaaagaggtgtctttaggtggcacgctgcaacaggttgatgcacctaagggtgaatgctattcaatcatcgacggccaatactgggaggttgtatgaagcgctacggaatcacgcagcaggacctcaaaatcactcgcaaggccatgaaggtggccctgatgtatgtcaaccagtcacctgaagacatgaacgcatggcacggctactatatggcccagctggcagcaatttatcatactcgtaagataatgtatgctaaccctgttcgtaattagcgtgtacgccctgattgtcctgtactttgtgcgggactttcacaagggtatcaaggtacacaaagcatcattcagttacctgaagtggggcttcttgcctcgctttactgtacgactacctaatggccgctttaaggcaaacaaggtaggcattttctacatcgcaacccattgacacgtcataaggaaacaaccaaatgaactacaccgacatgcaagaacgcttagacgtcatccgtaacctgtcaatctgtgaactcgacaagcgccaaccgctattggttgcactcatcgcggaccttgtgaactgtgagacgtccgatggtgacgatacggatagcgattggggtctggagcgacaggactactggcaaaccctgaagattaaggccaaagacgctggattcaacctgctgggtaatggtcacttcagcgcagcgtttaagcacgagctgctgccgggtagggtcattaaggttggctttaagaaagaggactcaggggccgcctacgtggctttctgccggatgcatcaaggccgggtagggattcctaacgtctatcacgtagcgcgtcacgcaggctgctatacggtggtactggatgagcttgagccttgtcaacgcttcgagaacgagccgcacgagcattacgcagaccttgcgagctactttgtggagaactctggtgcagagctgggcgatgttgacggtgcagagaaggaattacccttcgtcgagacatgccaaatgattaacaagttcttctacgggattgcatccttcgatatgcatagcggtaacatcatgttcaccaaagacggcaagccagttattacagacccggtgtcattctcacaggaccgcgaacgtgagcctttctcgctggagcctgaggagctacttgcagagattgagcagatagcgcacgacaagatgattgaacgctgtaggcgcaacaaggctaagcgtgacccgaacggggagctacgcatcgcacgccgtaaggccaataaggaacgtcgagcaatccgtaaggcacacgctaggtggcgtaaggagcgcgagcgcattaacgctgaagccctgaagtttgaccttgcgaaaatcgaggggcgagttctagcgtggcaagtgggacccggcctagcaatacagcagggcaagccactaccaatcgacaactaccttcaaggtagacttatgggttaacgaggtgcatcttaggtgactctcacgcaagaggcaccaatagataaactttattaacgccagttcgctggcaccaaagaggcacacaatgaacgcattaaacattgcacgtaatgacttctcagagattgaactggccgctatcccgtacaatatcctcagcgagcactacggggacaagctggcacgtgaacagctggcacttgagcatgaagcgtacgagctgggcgaacagcgtttcctgaagatgttagaacgtcaggtgaaagctggtgagttcgctgacaacgtggccgctaaaccgctggtcttaacgctgcacccgcagttaaccaagcgtattgacgactggaaggaggagcaagcaaacgctcgcggtaagaagcctcgcgcatactacccgattaagcacggtgtggcctcagagttggccattagtatgggcgctgaggtgctcaacgagaagcgcggagtgtctagtgaggcaatcgcactgttgaccattaaggtcgtcttagggacgctcacagacgcctcaaaggcaaccatccagcaggtgtcctcacagttaggcaaggcccttgaggacgaggcccgcttcggtcgtattcgtgagcaggaagccgcctacttcaagaagaacgtagcggaccagctggacaagcgcgtaggccacgtgtacaagaaggctttcatgcaggttgtcgaggccgatatgatatccaaagggatgctgggcggtgacaactggtccagctggaagaccgacgagcagatgcacgtggggaccaagctgctggagctactcattgagggcactggtctggtggagatgaccaagaacaagatggccgatggctctgacgatgtgaccagtatgcaaatggtccagctggctccggccttcgtggaactcctgagcaaacgagcgggagcactcgcgggtatcagccctatgcaccaaccgtgcgtagtccctcctaaaccttgggttgaaaccgtaggcggtggctactggtcagtcggtcgtcgcccgctggcgctggttcgtacccactccaagaaggcactgcgccgctacgcagacgtgcacatgcctgaggtatacaaggcggtaaacctcgcgcaaaacacgccgtggaaggtgaacaagaaggtgctggcggtagtcaacgagattgtaaactggaagcattgcccggtgggtgacgtcccggcgattgagcgcgaagagttgccaccacgcccggatgatatcgacaccaacgaggtggcacgcaaggcatggcgcagggaggccgcagcggtctaccgtaaggacaaggcccgccagtctcgccgtttgtcaatggagttcatggtcgcacaggcaaacaagtttgctaaccacaaggccatctggttcccgtacaacatggactggcgcggacgtgtgtatgctgtgagcatgttcaacccacagggtaacgacatgaccaaaggtatgctgacgctggccaaaggtaaaccaatcggtctcgatgggttctactggctgaagattcacggtgcaaactgtgcgggcgtcgataaggttcccttccctgagcgcatcaagttcattgaagagaacgagggtaacattctggcgagcgcagccgacccgctgaataacacatggtggacacaacaagattcaccgttctgcttcttagcgttctgcttcgagtacgcaggagttaaacatcacggcctgaattacaactgctcgctgccgctggcgttcgatgggtcctgctctgggattcaacatttcagtgcgatgctccgcgattccatcggtggtcgtgcggttaacctgctgccttctgataccgtgcaggatatttacaagattgtggccgacaaggttaacgaggtgctacaccagcacgttgtcaacgggtctcagacggtggtcgagcagattgctgataaggagactggcgagttccgcgagaaggtgactctgggtgagtccgtgctggctgctcagtggttgcaatatggtgtgacccgtaaggtaactaagcgttctgtcatgacgttggcgtatggttccaaggagttcggcttccgccagcaagttcttgaggacaccattcagccagctattgacaatggcgagggattgatgtttacgcaccctaaccaagcggctggctatatggctaagctgatttgggacgctgttaccgtgaccgtagtggccgctgtcgaggctatgaactggttgaagtctgccgctaagctgctggccgctgaggtcaaggacaagaagaccaaagatgtgctccgcaagcgctgcgcaatccactgggtaacaccagacggcttcccggtgtggcaggaataccacaagcgtgaccaagcgcggttgaagctgacgtttctgggtcaggccaacgtgttcatggcgtacaacaaaggggacaccaaggagattgacgcccacaagcaggaatccggtatcgctcctaactttgtgcactcacaggatggtagccaccttcgtatgacggtagtgcacgcttatgaggtctacgggattgactcctttgcactcattcacgactccttcggtaccattccggcagacgctggcaacctgttcaaggcggttcgtgagaccatggtgaagacttacgaggataacgatgtgattgcagacttctatgaccagttcgctgaccagctgcacgagtctcagctcgacaagatgcctgaggtaccagctaaaggggacctgaatctgcgcgatatcttagcgtctgactttgcgttcgcgtgaggtctccgataattaggtagcactatagggacccgctctgggtccatatacttaaagacaacttaaagtaaacttaaagaggcacgccatgacttactcaatcgtcgtaaccatcttgttaatcgtcgtaaccatcttgttcatccggtctgttctgaacgcaaccgacctacagagcactcttagctcaaaggtggaaacacataaacaggccctagagtcagctgtcaccaaggtacgtcgggcagaagaggacagagcgtcatactaccgaaggttacggcacattgaggacctactggatactgagaaagacagggtgatgactctaagtgggcgcatcgcaacccagcgcgaccgaatgaagcatctccgtaagcacaacgatgagttactgaatgagttgctgatggtctccgacctgattcacgttaagttcaccgcacgattacctgacggacagccagtaaagacgctctttaagttaggacttggtccgtgcggtttgtacgttaagtccctccgctggaccgagctggaagaccgctatctgatagaccagctgtgcaccaacggcgagcgtaagcagttcgtctactataagaacgaagtagtaggacgcatcgagttccgccacggtaagtctgaataaggtagcactataggaacatactcaaggtcatcacgtttggtggccttcatgaatgtcccttactagcacaatcaggagcaacactatgtatcagaacacaatcaacttcgagcgcagccgtgaacgtcagcagaccgagggttacatccctaagggccgcaagctgaacaagacgaaacgcggtggaggcgtgaagggttccttccgtaacgcgaagggtgacagcgttgttaaccaagagaaatacttcgtaggagcgtaacaaatggctgggaaaactaaatggcttttcgatgggagtacctcacagtggtcacgattgggtgctaccgagcgtaggttgctagatgaaacgggtttacaggtggtgatggtggacgaccctcttacaaacacggtgctgttcgacgtgtatgaaccacacccggatggtgacgtactactgattaccagaagatttagccactggtctattgactcagcgtcagactggctggcaaaactcatggtagactactcaagttggaaatgattaggtagcactataggcagactcaaggtcatcggattccggtggcctttatgattgcttattgcacactaaatgaacactaaactctggagacatcctcatgatgaacattaagactaatccatttaaggccgtatcgttcgttcgctctgctatcgagaaggcgttggagacttccggttacctcatcgcagacactaagcacgatggtgtacgtgggaacatttgcgtagacaacacagccaacgcagcgtggctcagccgggtctccaagaccattccggcccttgagcatctcaacggtttcgaccagcgctggcagaagttactgaaagatgaccgctggattttcccggatggcttcatgcttgatggtgaactcatggtcaagggtgttgacttcaacacagggtctggccttctacgtaccaagtggaccaagtgtggtaacttcgattaccatacagacccgatggccccgctgaaggttccgtttgaactcgacactaagcatcttcaagttgtcctctacgatatcattccgcttgacattatcgagtccggtgatgactacaacgtgatgaccctccttcgccttgagcacgtcaaagtcgccttaccagttctgcaagaccacttccctgaagtcgagtggtgcctctcggagtcccatgaagtttacgacatggacgaactcgatgcgctttaccgacagaaacgcaaagaaggtcacgaaggtctggtagtgaaagacccacaaggcttctataagcgcggtaagaaatccggctggtggaagctgaagccagagaatgaggctgacggtgtagtcgtgggaatcaactggggaactcccggtcttgccaatgagggcaaggtgattggcttcgaggttctccttgagtccggtcgagtggtgtccgcaaacaacatctctcaggcacttatggaagagttcacagccaacgctaaggcacatttcacagtagactgtccggtcaacccttacgagggctgggcgtgccaaatcaagtacatggaggaaactccagacggctctctgcgccacccgtcgttcgacaaatggcgtggaacagaggaagaccctaccgttaagatgtaattaggtagcactataggagacaacaatatgtccatcaatctgattctaatcatcgtgttcatcctcgcggctatcgtgtggtcaatgaacgacgaaccaccatatagcggaggctaaaccatgcgcttacacttcaacaaatccaacggtatcttctcggttcgccgggaggacagaagcactgtggcagcctctgagcgccacggtaagattccacgtatcggcgacacccttgaactggcacctcgtgtgcacattttggttactcgcggtctctacgaattggctcagactaagagccgtcctttcgtacccgtggtggtaaccaagtggccacgccttcgcctgttctgggagcgactcaaggaggttttcgatgacggccaagagtaagcacaaggaccactgcgcatccctgcacagcttccgagcgtgtgactgtgggcttgaacctagccgccttcacacaggcgactgtaagatatggaacggcgctggtcagtgtacctgcgagcagacccgagacgatggtgtcaagcagcccagccactaccagctgttcgaaggcgtggaggctatcgaggtgattgctcgcagcatgacccaagagatgttcaaaggttactgccttgggaacatcctcaagtaccgactgcgggcgggcaagaagtccgagctggctaccttagagaaagacatggcgaaggccactttctatctggagctgtatgcaaaatataaggggtcgtgtcatgattgaattaacaccgagtagaattaaaatcctgaaaatttgggccaatgatatactaagaatctatcaaactgaggacttcaccaaggaggagcttgagttcatagaggagattttagagaatgaacccgagtgaatgggcaagaaggatgtacgagaagacgctcgaccctgcgtacatcaccctgtataacatgtggaaggagcgagaagatgcaaaagttcgtcgtaacggtcgagacagctaacgcatcgtacgaactcccggtacacgctgggtctcttgaggaggccctagaagttgccgaggcggagtacgaagagttaggccaagtgactcgggtacgcccagatagtcattaggtagcactatagggacacaggttgtccctcttactgtttaaacttaaaggagattcatcatggcattcgctaagaagaagatttataccaccaagattggtacctgtgagccgtatgcttacttcaacaagccggactatggcggtgagggttttgagaacccacgcggtacctacaaaggttccgtaacgttcaagaacgaagactgtcaggagctggtagacctcattgttaagacccatgaggaaaactacgcggcccgtctggaagctcacgaagcgaacccgccgaaggttcagaagggtaagaaacctctgaagccgtatgaaggcgacatgccgttcttcgacaacggtgatggtaccaccacgttcaacttcaagtgctacggttcatacgaggacaagaagactggcgagaccaagaagattgttctgggtgtagttgacgccaagggtaaacgcatccaagacgttccgattatcggtggcggctccaaagtgaagattcgcttctcgctagtaccgtacggatggtctgcggtagctggcgcttccgttaagttgcagctggaaggcgtgatgctggtcgaactggctacctttggtgggggtggtgaagacaactgggctgacgaagccgtagaaggcggttacgaagctggcgaacctcgcagccgtaaacctcaggaagacccggaaaactggtctggcgaggaagctgacgagtgcgaagctgaagaagacgatgatttctaatggctggctatggggccaaagggattcggaaggtgggtgccttccggtctggccttgaggacaaggtgtccaagcagttagaatcaaagggcgtcacgttcgactacgaattgtggcgcatcccttacgttattcctgcgagtgaccacctttacactccagacttcttgttacccaacggtatcttcgtggagactaagggtctctgggaagccgaggaccgcaagaagcacctactgattcgtgagcaacatccagagctagacattcgtctggtattctcgtcgtcacggaccaagatttacaaagggtcgcccaccagttacgctgagtggtgcgagaagcataacatcttgtttgccgacaaattgattcccgtagactggctgaaggagccgaagcgtgatgtaccgttcggcaagttcaagcagaagaaaggagcaaagtaagcatggctaaggttcaattcactaagcgacaggagacctctcagattttcgtgcactgttctgccactaaggcaaccatggacattggtgtccgtgagattcgccagtggcacaaagagcaggggtggctggacgttggctaccacttcatcatccgccgtgatggtaccgtagaggcgggccgtgaccaagatgctgtaggttcacacgtcaagggctacaactcgacttcggtcggtgtgtgtctggttggaggcatcgacgctaagggtaaccctgaagcaaacttcacgccagcccagatgcagtctctgcgctcactgctggtagaactgaaggtgcaatactccggggcagtgttgatggcacaccacgatgtagcaccgaaggcttgcccaagcttcgacctgaagcgctggtgggagaagaacgaattggtcacttctgaccgtgggtaaacattaggtagcactacagggagacaattgagtttccctgttgtcgcttgaggagattactttatgagcaaagaacacatcatcgacattgcagtcctcattgtcacaatactgtccgcaatggtacttggtgccacccttacgtattcctatcttaattgaggtgaccaatggaaaacttaaagcaacacttcgctgacacatggcctctgtatgcttacgcatcatgctttgtatttggcggactacgtttggtgttctgcctatgagttacggagactctcaagaggacggtcaggagagtatcttcctgttccacgctccgtgcgaaaactgtggttcttctgatggtaactcagtgtactctgacgggcacgagtactgcttcgtgtgtcaacaccgggttcccggctcagaggaacgtaccgaaaagttatcatcgagaaggcccaaaggagggaattacgggatgaatacacaaggttcaggcttattggtattcggcgagagtgacggtcggtacactgacctgacggctcgtggtatctcaaaggcgacatgccagaaggctggctattgggtcgccaaggtcagagggactgcctatcaggtggccgactatcgtgaccagaatggctccatcgtctctcagaagctgagggacaaggagaagaacttctctaccagagggtctcacaaaggggatgcactgttcggtaagcacctctggaatggtggcaagaagattgtcatcaccgagggtgaaattgacatgttaaccgtgatgcaacttcaggattgtaagtggcctgtggtttctctcggtcacggtgcgtcagccgctaagaaaacttgcagtgcaaactacgagtatttcgatagcttcgaccagattatcctgatgttcgatatggatgaccccggtcgtgcagctgtagaggaagccgctcaggttctacctcccggtaaggtccacgtggccgtgctaaccgagaaggacgccaacgagtgtttactcaagggcaagggcaaggaggttctcgaccagatatggaacgcggccccttgggttccagatggtgtgattggtgctatgtccatgaaggaccgggtgagagaggccatgaccagcgaacagagcgtgggataccttttctcgggatgtccgggactgaatgaccgaaccttgggcgcacgtggtggcgaagtcatcatggtcacttctgggtcaggaatgggtaagtcaacgttcgttcgccagcaggcactagggttcgccagagagcaaggactgagggtaggcatggcgatgcttgaggagtccgtagaggagaccatggaggatgtcctagggattgctaacggaatccgcttacggcagcaacctcgtgagttcaagcagaagctgatagaagacgggacgtatgataaatggttcgatgagctgtatggcaccgaccagttccatctctacgactcctttgcggaagctgaggtggaccgcttgctggccaagttgcactacatgcgcacagggttaaactgtgacgtaatcattctggaccacatctcaatcgttgtgtcagcctcggaggaatccgatgagcgcaagatgattgaccgactcatgaccaagttgaaagggttcgctaagtcaaccggagtggtacttattgttatctgccacctgaagaacccggagaaaggtaaagctcatgaagaaggacgtgctgtttccattactgacctgcgtgggtctgggtctctgcgtcaactctctgatactatcattgcccttgagcgtaatcagcaaggggacatgcctaatcttgtcctccttcgtattctcaagtgtcgctttaatggtattggcgttggaattgcgggatacatggagtacaacgaaaggaccggactccttgaaccgtctagctacactggcggagaaggagagggtgatactggctgggaaggccacgaagaagacgactattgaaccagactggaagttaacaacacaatgtaattgcccatgtgatagaccgtgcgtctgtcctgaccgggcttaatcaacctgaggagaaccatcatgtttaaacttatcgaagcattaggccgtctggtcatcgcgttgtacgtacgtgaagccaaggcattggacaaagcgtccaaggtggaagcagaagcagccgctaagctggctaaggccgccgacaaggcacgtcaggcatctcttgatgcaaccgcagaggcagcgaaagttgcacttaaagctcagaaacttaaggagttcttctaacccatggacatttacgtgctagtcggtatgcttattggcgtcctgctcatacatctatcaacataaggagttcttctaatgactaccaaagctaaattccccggcaacaccattcagctgtccgacactgtagaccagtggggccgcaaggttcacatcaacgtacgcaacgacaaggtaactctggtctaccgctggaagtcaaagagcgataaccgtgctcacactcagcgtgtgaccctagacgatactcaagcagctcgactgctggcatccgtagccgtagccgctactgtggccatcggtgaggacaaagtgcgtgaggccatcctgagtaaagaggtaggctcaacggcaacccgactggccgaagcgtcagaagctaagtgataaactcaaggtcattactatatgtagtggcctttatgattatcatacacaacatattgagaggacataaccatgcgtaaacctgaagaaatccgtgcagacatcgagaagctgaccaaagagctggaagctgttaaggttcatgagtccagacaggttgctgctgtcaacatcctgtataacttagggtggacacacgaccctcacaaaggctggcagaaacccacaccaaagtggagtgactacaaggcccgcttaaggctggcgagctggcaacttgggacgacagggttctcggtggaatagtgtacatccgaagtgttggagacaagtttgcccaagtgtcccacgttcgtggtgttagtagactgggagctgatgtactgaacagtagctttgccgtagagaaaagtaagttaaccgtgcgtccacgtgagtatttcatcgggcgtcgttaagtaacaggagaccactatgttagtatccgatatcgaggctaacaacctcttagagaaagtcactcagttccactgcggtgtcatttatgactacagcacggacgagtacgtatcgtatcgaccttgggacttctcagcgtatctcgatgcgttggaagctgaggtggcgcgtggtggtctcatcgtattccacaacggtcacaagtatgatgctccagtgctgaccaagctggccaagctccagttaaaccgtgagttccacctgccgcgcgagaacgtagtggacacgttggtgctcagtcgcctgctgtttgcgaacattaaggattccgacatggccctgctacgttccggtaagttacccggtaagcgcttcgggtctcacgctctggaggcgtggggttaccgcttaggcgtgatgaagggtgaatacaaggatgacttcaagaagctccttgaggaacagggagaggactatgtggacggttctgagtggattagcttcaacgagccgatgatggattataacgttcaggacgttgtggttaccaaggcactcttagagaagttgctgagtgacaagcactacttcccgtatgacgttaactttaccgattgctgtactgatgccttttggtatgattcctgtgaggctgtatggctggaacaccgagccgcttggctgctcgctaagcaggagcgtaacggcttcccgttcaacaccaaggccatcgaggaactctacgtagaactcgctggtcgccgctctgaactccttcagacacttaccgacactttcggaacttggtatcagcctaagggtggcactgagttattcctgcaccctcgaaccgggaagcctctgggtaaatacccacgagtgaagtatcccaagcagggtggcatctacaagaaaccaaagaacaaagctcaacgtgagggtcgtgaaccctgcgagctggacactctggattacgtagatggtgctccgtacacaccagtagagcacgttgtgtttaacccaagtagccgagaccacattgcactcaagctgaaggaagccggatggatacctacagagttcaccgataaaggtgcacctaaggttgacgatgaggtccttgagcatgtgcgtgtggacgaccctgagaagcagcgctgtatcgacctcatcaaagagtacctgatgatacagaagcgtatcggtcaggcagctgagggtgacaaagcgtggctacgttacgttcaagaggatggtaaaatacatggttcagtcaatcctaatggtgccgttacgggccgagcgactcacagcttcccgaacctcgggcaagtaccgggtgttcgaagtccttacggcgagccttgcagggctgcttttggtgctgagcatcaccttgatggcctcactggtttaccttgggtacaagctggcatcgacgccagtggtctggagctgcggtgtctcgcccacttcatgtccaagtacgacgggggagcttatgcagatgttattcttaacggggacatccacacagtaaaccagcaggctgctgagctgcctacacgcgataacgccaagacattcatctacggcttcctctatggtgctggtgatgaaaagattggacaaatcgttggagcaggtaaggaacgcggaaaggaactcaagaagaaattccttgagaacaccccagcaatcgcagccctgcgcgaaggaatccagcagaccctagtcgagtcatccagatgggttgccggagagcagaaagtaaagtggaaacgtcgttggattaagggactcgatggacgtaaggtacacgtacggtcaccgcatgctgcactcaacaccctccttcagtcagctggcgcgctcatttgtaagctctggattgtcgagactgaagagttacttctcaaagctggattaaagcacggttgggatggtgattttgcgtacatggcgtgggttcacgatgaaatacaagtggcctgccgtaccccagagattgcacagcaggtgattgacattgcacaacaagcgatgcgtaacgttggggaacactttaagttccgatgccgtctggatacagaaggtaagatgggtccgaactgggccgtatgtcactaatactatacaggagatttatcatggctatgactaaacgtgtgcgcgtaacatttgactctaagtttgtagcaggtacgaatgatatcaacgagttcgctaagacacttgtgagctactctaagcgcttcatggagggtgataataccctaaaaggcgaccagctggctcttgcagagatggcggcgaaggaaggcgtagaggctgctgtggaactgtctatcaaaatgtcctactcaaaagctatcaagagtgaactagctgacgactgcgtgacagtctccaacattcgaatggagattaaacagtgagcgagtacctaaaagttctggcggccctcaagggctgccctaagtccttccagtcgaactacgtgcggaacaacgctgcgttagtcgctgaggctgcgagccgtggtcacatttcgtgtctgaccatgagtggtcgtaatggtggcgcttgggaaattaccagtgccggagtgaaattccttaagacccatggaggttgtttatgaaggactttttaggccaagaggtatcagtaggtgaccgcgtggtaattacctcatatggtggctacgggctgtctaaaggtaccattgagaagataaacccaaagaccgtagtggtgcgcacaagtcccggaaagtacgggacaactcgtaagggacccgagtatttcgtaaagattcaggaggtgaccagtgagtaagcgaatggtgttcgtacatccgttgcaacctaaatcacactggaaaactgctggtggcatcgtctggttttataaggatggctacatactacgacagtcccatgtcacccacaaggaccttcacgacccgaagatgggtttaaattcaaggaattaacgaatgagtaagcacacattgttatccttcagtgactaccgggcgacccagaagattaccaagggtgtccttgtgatggatggtgactggctggtattccaagccatgagtgccgctgagttcgatgcctcgtgggaggaggagatttggcaccgttgctgtgaccacgctaaggctcgcgagattctggagaactccattgaatcctacaaagggcgcaagaaggcgtggaagaatgcagacgttgtcctagcgttcactgaccgtgtcaactggcgtaagctgctggtggacccaatgtacaaagagaaccgagctgtcactaagaagcctgtgggttacttcgagttccttgagtccgtctttgagacctacacgtgcgtccttgagcctcagctcgaaggcgatgacgtgatgggtatcatcgggtctaaccctctcgtgtataactacgagaaggccgtgctggtctcctgtgacaaggactttaagaccatcccggattgtgatttcctgtggtgcacgactggtaacatcctcgttcagactcaggagaccgctgactactggcacctcttccagactatcaagggtgacatcaccgatggttacggtgggattcccggatggggtgataccgctgaggacttcctcaaggaaccattcattgtggagcctgtaacgtccgtactgaagtcaggtaagaacaagggccaagaggtaaccaagtgggtgaaacgcgctcctgagccgggagagacgctctgggactgcattaagtccattggtgccaaagcagggatgaccgaagcggaagtaatcaagcagggccagatggctcgtatcctccgttctgatgagtacaacatcgagactggggagattactctatggcaaccgggcagctgattcttatcgtcctgaccattggattaatcgctcgtggtctctggatgttggccttgattatcaagcagatagttgagcacaaagcagagtgataaactcatgggcactaattaggtagcactatagggaagtgcccattatgattattacttaaagattacttaaagaggagactcaaatgttaaaacctatagagcacatccttaacaatcctaatgaccttcctgacgtaccgcgagctgtcaaggagtacctacagtctcgctacaatgctgacttcctgtatcaatcagaggtccgtaagctgcgtgaggctggccacagcgaggagttcatctccggggtactgtacggtcactacatggcttctcgtgtccttgacgagatggagggacgccagcgtgcactcaaagaaggagattgattatgtgtttctcacctaagatgaaagcacctaaggttgacacaacgactgtccctgagccagctccgctaaccgaggaacctaagggtgtccagtatggtggcgacgaagactcaaacagcaccactcctgaggtgtcaggacgtaagtcactcaaggtgaccaagacgaccgagcctacagggtccgtcagtaaaatccgtaagtcagctttaggaggctaacatgggactgttcaagaaaatcaagaaggctatctccaaggtagtcaaagcgccactcaaggccgtgggtctggcagcagatgcacctaacgtgcagacagtcgctgagacacctgtggccgcacctcaggaagcaccaaaagaggtcgtggaggacgttgagtcttcagcagacactgagtctggtaagaagaaaactcgtgcctccggtaagaagtccctctcagtttcccgcagctcgggcggtgggattaacttatgattggttacggggagggctaacaaatggcagaagttaaactcgaaggcttcgcagaggagggagccaaggcggtatacgaccgtctgaagaacgaccgacagccttacgagacacgagcagagtcctgtgcgcagtacacgattccctcgctgttccctaaggattccgataacgcatcgactgattacacgactccgtggcaatccgtaggtgctcgcggcctgaacaacctagcgtccaagctgatgctggccctgttcccgatgcaatcatggatgaagttgaccattagtgaatacgaagcgaagaaccttctgggtgacgctgagggtctcgctaaggtcgatgagggcctctcaatggtagagcgaatcatcatgaactacatcgagtccaacagttaccgagtgactctctttgagtgcttgaagcaactgtgtgtggctggtaacgcgctgctgtacttaccggagcctgagggttatacccctatgaagctctatcgactgaactcgtatgtggtacagcgagacgctttcggtaacgtactccagattgtcaccctagacaagattgcgtttaacgctctccctgaggatgtccgcagccaagtggaagcagcccaaggtgagcagaaggaagacgctgagattgacatctacacccacgtgtatctgaacgaagccggggatggttactcgaagtacgaagaggttgccgaagaggtagtaccgggcagcgaagctgagtaccctctcgaagagtgtccatacattccggtccgtatggtccgcatcgacggtgaatcctacggacgttcctacgtggaagagtatctgggcgacctcaagtccctagagaacctccaagagtctatcgtgaagatggcaatgattaccgccaaggttatcggtctggtagacccagcaggcatcactcaggtccgccgactcacggcagcacagtctggtgcgttcgtaccgggccgtaagcaggacattgagttcctccaattggagaagtccggtgactttaccgtagcgaagaacgtaagcgacaccattgaggctcgcctctcgtatgcctttatgctcaatagtgcggtacaacgtacaggcgagcgagtcacagctgaagagattcggtacgtggcttcagagctggaagatacccttggtggtgtctattcgattctctcgcaggaactccaactgcctctggtacgagtgctcttgaagcagctacaagccacgcagcaaataccggagttacctaaagaggccgtcgagccaactatcagcactggccttgaggctatcgggcgcggtcaggaccttgacaagctggagcggtgcattaacgcatggtctgcccttaaggctctcgaaggtgatgatgacctcaacttggctaacctcaagttgcgcatcgctaacgctattggactcgacacagctggtatgctgctcactcaggaagagaagaacgcccttatggcacagcaaggtgctcagattgctacacagcaaggggccgcagcattgggtcaaggtatggccgctcaggctactgcaagtcctgaagcaatggccgcagcggctgattcagtcggtatgcaaccgggcatgtaattaggtagcactatagggagacgcatccagattgagtgaggtctggtctgaaggttcgagtccttcgtgttttccctcttagtcttaactttaaggagattgaaatggctggcgaatctaacgcagacgtatacgcatccttcggtgtcaacagtgctgtgctgactggtagtacacctgaggagcaccaagaaaacatgttggctcttgatgttgctgcccgtgatggcgatgatgcaatcgagcttaacaccaacagtgatgacccgtatggctccgatgtggacccgttcggtgaacctgaagagggccgtatgcaggtccgcatctccgctgacggttcagacgaagagtctaccgaaggtgaagagggttctgaagaagaacagcatggcgacgaagggagtcagccggaggaagtaaccgacgatggcgaacatgaagagttcaaaccgattggtgaaactccggctgacatcaacgaagcctctcagcagctggaagaacacgaagctggctttaacgacatggttgccactgcaatcgaacgcggtctctcacaggatgctgtgacccgtattcagcaggagtaccagaacgaagacagtttgtccgatgagtcctaccgagagttggccgaggctggctacagcaaggcgttcgttgatgcgtacattcgtggtcaggaagctctggtaaaccagtacgtagaaaaagtgatggacttcgtcggtggccgagagcgcttccagcaggtctatggtcacatgaagaccaataaccctgagggcgctgaggcgctcatcaaggcttttgagtctcgtgacgtagccaccatgaagacgattctgaacctagcgggacagtctcgtgataaaacctttggtaagaaagctgaacgcactattaccaagcgtgcaaccccagcgaaacctgtggcccgcaaggccgaaggcttcgagtctcaggctgagatgattaaagctatgtctgacccacgttaccgcaccgactctaagtaccgtcgtgaagtggaacagaaggtcatcgactctaagttttaattaggtagcactatagggagaccccagcgccgatgcaaggctgggacttctcccttcgagttacacaatgagtatcacctcgtttcaagtagtacctcaaaacatttcgtataaacaacataaggagattcaacatggctaacatgcaaggtggacagcagctcggtactaaccaaggtaaaggtcaatccgcagcagacaagctggcgctattcctgaaagtattcggcggtgaagtcctgaccgctttcgcccgtacctctgtgaccaccaaccgtcacatgcagcgtcaaatcagctccggtaagtccgcacagttccctgtgattggtcgcaccaaggctgcttacctgcaaccgggagagtctctggatgacaagcgtaaagacatcaagcacaccgagaagaccattaacattgatggcctgctgactgcggacgtgctgatttacgacatcgaagacgcgatgaaccactatgatgtgcgctccgagtacacctctcagattggtgaatctctggcgatggcagctgatggtgcggtactggccgagctggccggtctggttaacctagctgattccgtcaacgagaacatcgctggtctgggcaaaccgtccctgctggaagttggcgctaaggctgacctgactgacccggtcaaactgggccaagcggttatcgcacagctgaccattgctcgtgctgccctgaccaagaactacgtcccggcgaacgaccgtacgttctacaccaccccggacgtgtactctgcgattctggcggctctgatgcctaacgctgcgaactatgcggctctgattgaccctgagcgtggttctatccgtaacgtgatgggcttcgaagtcgtcgaggttccgcacctgaccgctggtggtgctggtgatgaccgcccagacgaaggcgcagatgcgaccaaccagaagcacgccttcccggcaactggcggtaaagtcaacaaagagaacgttgtaggcctgttccagcaccgttccgctgttggtactgtcaagctgaaagacctcgctctggaacgtgctcgccgcgctgagtatcaggctgaccagattatcgctaagtacgcgatgggtcatggtggtctgcgcccagaatctgctggtgcgctggttttcacagcgtcggcttaagagtagcagcctttagtgcaaccgttgagagtgaaccggaagaagtagctctcacgcctcagcagaaggccgcaatcacacgtgcacgtaacaaggcacttaagtcgatggaacaataagccaaaccccttggggaccactcacggtctctgaggggtttttttcgttaggagcttacattatgaacatgcaagatgcttactttgggtctgccgctgagctggatgccgtcaacgagatgctcgcagctatcggcgaatccccggtgacaacccttgacgaagatggtagcgcagacgtagcgaacgctcgtcgtatcctcaacaggattaaccgccagattcagtctaaaggttgggccttcaacatcaatgagtcggccacattgaccccggatgccagcactgggcttatcccgttccgtccggcctacctgtccatccttggtggccagtacgttaaccgtggtggctgggtgtatgataagtcaaccaacactgacaccttctcaggaccaattaccgtgaccctgattacccttcaggattacgacgagatgcctgaatgtttccgccagtggattgtcaccaaggccagccgccagttcaactctcggttcttcggagcggaggacgtagagaactcgctggcacaggaagagatggaagcacggatggcgtgcaatgagtacgagatggacttcgggcagtacaacatgcttgacggtgacgcatacgttcagggtctcatcggtcgttaatcagaaacttaaggaggaccaaatggctctcgtatcacaatcaatcaagaacctcaagggaggcattagccagcagcctgaaatcttacggtatcctgagcagggtacacttcaggtcaacggttggtcctccgagactgagggtctccagaagcgaccacctatggtgttcatcaagtccttgggaggacgcggatatcttggggaggacccctacattcacctaatcaaccgcgatgaatacgagcagtattacgccgtgtttacagggaacgacgttcgggtattcgacctgtccggctatgagtatcaggtccgaggggaccgctcgtatgtgaccgtcaataaccctaaggataacttgcggatggtcaccgtggccgactacacgttcattgtgaaccgtaccagacatgtccgggagagtcagaacctgaccaacggtggcaccttcagagataacgttgacgccctcattaacgttcgcggtggtcagtatgggcgtaagctcgaagtgaacattaacggcgtgtgggtaagccaccagctccctccgggagacaacgctaaggatgacccgcctaaggtggacgcacaggctatcgctgaggccctagcgactcttctcatagcagcacaccctacgtggacgttcaacgtgggaacaggattcattcactgcatcgctccagcaggtaccaccattgacatactggagactaaggatggatacgccgaccagttaatcaatccggttactcactacgtccagagcttctctaagttacctctgaacgcaccagatgggtacatggtgaagattgtcggggacacatccaagaccgccgaccagtattacgttaagtatgacaagagtcagaaggtctggaaggaaactgttggatggaacatctcgatagggctggattacaccactatgccttggacgcttgttcgcgcagccgatggtaactttgaccttgggtatcatgaatggaaggaccgacgcgctggtgatgacgataccaaccctcaaccatcctttgtgaactcaacgataaccgacgtgtttttcttcaggaaccgcttagggttcatctctggtgagaacattgtgatgtcgcgtacaagtcggtacttcgagttctacccgccgtcagtggccaactacacggacgatgacccactggatgttgctgtgagtcataaccgagtgtcggtcctcaagtatgctgtgagcttcgctgaggagcttctgctgtggtctgatgaggcacagttcgtcctgtcagccaacggtgtgttatccgctaagacagcacagctggacctgaccactcagttcgatgtgtcagaccgtgcgcgtccttatggtatcggcaggaatatctactatgcgtctcctcgcagctcctttacgtccatcatgcgctactacgcggtacaggatgtaagctccgtgaagaacgcagaggacatgacggcccacgttccgaactacatcccgaacggtgtgtatagtattaatgggtcaggtactgagaacttcgcgtgtgtactgaccaaaggtgctccaagcaaggtgttcatctacaagttcctttacatggacgagaacatccgtcagcagtcgtggtcccactgggacttcggggatggtgtggaggtgatggccgcaaactgtatcaactcaacgatgtacatgttgatgcgtaacgcctacaacgtgtggatagctgcggttgactttaagaagaactctacggactttccgttcgagccttacaggttccacgtggattccaagaggtcataccgcatctcagagactgagtatgacattgagacgaaccagacggtagtgaacgtcaaggacatctacggtgcgtcgttctctaagggtaccgtggcaatctgcgagagtgacggtaaaatcaccgagtacgagcctacgggttcctcttgggattcaaccccggacatccgcattagcggtgacatctcaggtaaggacattgtcatcgggttcctgtacgacttccagtatgtgttcagtcggttcctcatcaagcaggagcagaacgacggcacaacgtccactgaggactctggtcgcctacagctgcgcagagcgtgggtgaactatcaggacactggcgcgttcactgtgagcgtcgataacggtagccgtgagttcaactatctggtaaacgccagagtaggctcgacaggtcttcgtctgggccagaaggccacaaccactggtcagtatcgtttcccggtgacaggtaacgcgctgtatcagaaggtgtccttgagttccttcaacgcttccccggtgtcgatcattgggtgtggctgggagggtaactacagcagacgcgctaacggtatttaactaaatgtctccctgtggtgccgctcaattaggtagcactatagggagaccacactaagaggggacgtaaagcatgtacataagaaacactgtaagtaatgacttcgagttattcatcccggcctaccatgacgtacttgaggcgcaggccatgggtatagaaccatcgttcccagcggttactgagtgtgtcacgttagaccacgatggttttcctttggctataggtggacactgcggagaccagtgctggttcgtcacgagcgaccaagtgtggagactcgacagggctggtaagctggagttccgtgagagaatcatggagtacagggacatgttattaaatgtttatccatccctgtggaacttcgtgtgggtcggcaacggtccccacaagcggttccttaagtccatcggtgctgtattccacgaggagtacactcagggtgggaagttccaactgttcaccataacgaggaggtaactatgtgctggatggcagctattcctattgcaatgacagcagtacaagccatcggtcagtcgcgcagcgaagccaagatgattggtcttcagaatgaccagatgcgccgacagtctactcaaatgattaaagagtcaaacattcagaacgctaacgccagccttgagcagaagcagaagctggaagaagccagtgcggacctgaccgctaagaatctcgataaggttcaggccatgggcacaatccgtgcagcaatcggagagggaaaccttgagggtgccagcatggaccgtatcagtcgaatcgaggagggcaagttcattcgggaggccaacgcggtcaccgataactaccgtcgagactatgcgtcactgttcgctcagcagctgggtaactccgagtcaactattgaccaagttaagtccatgcagaaggctgagggcaaaggtaagtccaagctggaacaggtgctggacccgctggccttaatgggttcgcagggtgcctcagcgtatgcttccggtgcgttcgatagcaagggcaccaaggcaccaataagtaaggcccaaggtactaaggtaggaggtaagtaatggccagtaaattagaacaagcattaagccaactcccacaggctgggtctacccgcatccgtggtggctccgcgtccatgcagtatcgcccggtgaccatccaacaggaaggtgccagacagtccaacctagtgcagtccttggcgaagtttgggacagcagtaggagaagcagcggacgcatacgacaagcgccagcgagacaaggctgacgagcggtccgatgagattatccgtaagttgaccccagagcagcgacgagaggcaatcaagaatgggaccctgctgtatcaggatgacccgtacgctatggaggccctgcggttcaagactggccgtaacgctgcattcctcatagacgacgaagtggcacagaaggtccagaacggtgagttccgtacacgtgccgagatggaagagtatcgaaacaagcggttgaccgaaggtgccaacgagtacgctgagcggttcatgattaaccctgaggactcagagttccagaggggcttcaacgcgaacatcactgagcgtaacatctcactgtacggtaagcacgatacgttcctgagcgaccaagcccagaagggtgcaatactggcctctaaggtggagctgtcaggcgtacttaaagacccacaggttctggcccgtccagagtctggagagttcttccagcgctacatcgataacgccatcaaaacaggaagtatccctagcgatgctcaagcccagcaggtcatcattgggtccctcaacgacgtcatccagcgtccgggtgctaccaacttcttgcagagccttgagggccgtccggtcacccttaacgggaagaccacgacctacaaggaacttatgggagaggagcagtggaacgccctgatggtcaaggcccagtcaacccagttcgacaatgacgctaagttgtccgaaggtttccgccttgggattaccagcgcgttgaaccaagacgacaccagcaagggctgggagatgcttcagggtgccaaggcagaactggaccgcctgcaacccggtgaacagatgacaccagagcgtgagcgcctgattcaagctgaggagcagatgcagacccgtttccgtcaggaggcccaagcggcagccaaggagatggacaagcgtcaaaagaccattaacaagaatcaggtcatcgaccagcagttcaccaaacgcatcaacgggcagtatgtgtccaccagctacaaggacatgccgacaaacgagaacactggcgagttcactcacagtgacatggtgaactacgctaacgggaagctggctgagattgaccagatgcagctcacggagcaacagaaggaccgcatgaagctgagctacctacgggcagactcagagggtggagccttccgtaccgttgtaggccagatggtcaccgacgctgggtctgaatggtctgccgctgtgattaacggtaagttaccagaggacaccacggcgttgaacaagctgcgcaccatgcgtaacaccgacccggacctcttcgctgcactgtacccggataaggctgacttgtttctgacgatggacatgatggacaagcagggtattgacccgcagattcttattgacgctgaccgttctcgccgcagcctcaccaaggagatgcagtacgaggatgataaggcgtgggcgtccctgaagaacaactcagagtctcccgagctgtcccgcattccagctagtctggatggcatggcccgtaagatttacgacagcgtcaaataccggacaggtaacagtgacatggctatgcagcaggtagacaagttcctcaaggaatccactgtgactttcaaaggtgatgacgtggatggcgataccattggtattatcccgaagaacatcctacaggtcagtgatgaccctaagagctgggagcagggccgagacattctcgaagaagcccgtaagggaatcattgcggctaacccttgggtgaccaacaagcagctgacgatgtaccagcagggtgactctatctacatgatggacaccactgggactgttcgcatccgctatgataaggagctactgactcgaacctatcaggaacagcagcagcgactggccaaggaagccgaagagaaggcactgaaggaagcaaccaagcgtgcacctatctccgcagccactcaggcccgtaaggcagctggtgagcgcgtacgtgcgaaacgtaaagccactccgaagttcatttatggaggtggcgatgagtaaacaataaggagacaacatgagctacgataagtccaaacctagtgactacgacggtatgttccagaaggcagcagacgcacacggtgttagttacgacctactgcgtaaactgtccttcaacgaatcatccttcaaccctaaggccgtctctaagactggccctaagggcatcatgcagttcaccaaagcgacggcccggagcatgggccttaacgtgaccgatggtgatgacgatgggcgctacaaccctgagttagccattgatgctggcgctaagctgcttgccagtctcgttaagaagtacgacggtgatgagctgaaagcggccctagcgtacaaccaaggggaaggcccatcgggtgcccctcagctccaagcgtacgacaagggagacttcaggtctatctccgaggaaggccggaactacatgcgtaagctgctggacgttgccaagagtccacaatccggtgctctggaagcgttcggtggtatcaccccaaagggtaaagggattcccgcagaggatgccttcaagggcattgctaagactggtaaggtaggtactgcgctgccggagtcccatgggttcgacgtagagggtgtggagcaacctgcacccaacgtaccatacgccaaggacttctgggagaagaccggaacgactattgatgagtacaacgctcggtctaccttcttcggcttcggtgatgctgctgaggctcaacttcagaactcaaccttgggtgtggccttccgtgctgcgcgtgctgatgatgggtatgatgtgttcaaagacacgatgaccccgactcgctggaactcttacgtcccgtccaaggaggacttacagaagctgcgggactccgggttgcctccgagttactacggtgtggtgactggtggtgacggtgagaactgggatgcgctcatcaagctggccaaggataactttgaggctgaccaacgggccgctgaggctggtactggtgcgaaacttgccgctggtatcgtcggtgctggtgtagacccactaagttatgtacctctggtcggtgtagctgggaagggactcaaggtggtcaataaggccctgcgagtaggtgcacaggctggagcactcagtgttgcctctgagggaatccgtacgtcagtagctggtggtgaagctcactacgctgatgcagcacttggtgggttactattcggtgctggtatgtcggctctcagtgatgctgtggcggctggtatccgtaaggctcgtggagtcgagtctgtgaatgagttcgctggtccggcactccgtatggaagcacgagagacagccatcaacactggtggtcacgatacctctacactacctccagataacttctcgttcgagcagggccacggaggcgttccatttgctgaccacccaaccgaagagggcgcagtggttcttgccaatggttccatcctgagcgacaccaacccgcttaacccaaggacccagcgtgacttcgcagagattgacccagagcgtgcagctcccggtatcaaactcggtgggttcactgagattggtctgaagacattagggtccaaggatgctggtgtacgtacaatcgctcaggacctcgtacgctctcccacagggatgcaatcagggtctagtggtaagtttggtgcgaccgcttcggacatccatgagcggctccatgcgactgaccagcgaatgtacaaccaactgtatgacgctgttgaccgtgccatgaaggacccagagttctccattggtgagcagaagatgtcacgcagagccatccgtcaggaagtctacaagcgtgctgccttggcgattgagcgtccagagttacaggctgatttgaccaaaggtgaacgtgaggtgatggacctactgaaagagcacttcgataccaagcgtgagctgatggaacagccgggtattttcggtaacgctaacgccgtgagcatcttccccggtagtcgccataagggaacctacatacctaacgtgtacgataggggtgctaaggagctgatgactcagaaactaggcggacctgaaggactccaacaggcaatcgctcagagctggcttaccagttaccgagtgcgacctgaggttaaggcccgtgtggatgagtacctcatggaactcaacggctacaagtcggttgaccaagtgacacctgaggtggtccagaagcacgctatggacaaggcttacggtatcagccacactgaggacttcacggcatcaagtgtcattgacgacaacatcactggtctggtcggtattgagaacaactcgttccttgaagcccgtaacatgttcgacagcgacatcccggttaccttaccggacgggtcaaccttcagtgtcaacgacctgcgggacttcgacatggcacggattatccccgcgtacgaccgccgagttaacggtgatatctccataatgggtggtagtgggaagaccactaagcagctcaaggacgaaatcatggcgttagacaagcgggccgagcgtaagggacaactgaagggtgaagtggaagccctgaaggacaccgttaagattctcactggccgcgctcgccgcaacaatgacacagcctttgagacggctatgcgctccttgaatgacctagcgttcttcgctaagaacttctacatgggcccacagaacctcaccgagattgccgggatgttggccaagggtaacgttaaggcgatgctgcatggtatcccaacgttgcgtgacctcgccaccagaacctctccggtttccggtagtgaactccgtgaactccatggggcgctgttcggtaaggaactagaccagctaatacgaccggagcgtgaggacatcgtgcagcgaatccgtgaggcttccgataccagcggggccatggcgtcagtcattggtaccattaagttcggtactcaggagctgtcggctcgttctccttggaccaagatgctgaacggtacggccaactacattctggacactgcccgtcagggtgtgctcggggatgtggctggtgctgccctcggcggtaagggttccaagttcggtaaggagaacttcctcaaagctgcctctatcagtccagagcagtggaagggcatcaagcaactctttgttgaccatgcgactcgtgatgccaacggccagttcaccatcaaggacaagaaggcgttcagtcaagacccgagagcgatggacctgtggcgtcttgccgataaggttgctgatgagaccatgctgagacctcacaaggtatcccagcaggattccaaggcgtatggtgctggtgtcaagatggctatgcagttcaagaacttcaccatcaagtcactcaacgctaagttcattcggtccttctacgagggctacaagaacaaccgtgccatcgacatggccctgacccacgtgttgtctatgggtatcgctgggacttactttgcgatgcaggcccatgtgaaggcttacggactccaagaggctcaacgtaaggactacctgaagaaagctcttaacccgactatgctaggctacgcagcgttgaccagaagttcccacactggtgccccgctgtctatcgtttcgatgatggctggtgccgctgggttccaagatgccaacatgttgcgttctaccatcttaccgaagggcgaacagttccagaagaatgatggtgcagccaagggccgctctgagtccagtgacctagcaggtaacttagggtctcaggtcccagcgctgggttacgtagggaacgtcattgcgaccgctaagaacgcttacggtgttgctacagcgcctaacaagccgactgagcgtgactacatgactggcctgatgaactccaccaaggagcttgtacctaacgacccgctcacccagcagctcataatgaaaatctatgaggcaaacggtgtgaccatcaagcaacagcctaaacctaactaattaggtagcactatagggagaccgcttggtttcccttctcattcactttaaggaggtcataatggaccaagacattaaaacagtcattcagtacccagtgggagagactgagtacgacatcccgttcgactacctgtcccgtcgcttcgtcagagtgtctctggtctctgaggattcccgaagactgctgagtaacatcacggagtaccgctacgtctccaagaccagaatcaaactgctggtttctactgaaggtttcgaccgtgttgagattcgtcggtttacctcagcctctgagcgaattgttgacttcaatgatggctctgtgctgcgagcaacagaccttaacgtatcacagctacagtcggcgcatattgcggaagaagcccgtgatgcagccctgctggccatgcctcaggacgacgcaggtaacctcgatgcacgcggtcgccgtatcgttaacttggctcccggtattgacggcactgacgctatcaataaggaccagttagattcaacgctgggtgaggctggtggtatcctttctgatatgaaagaagtacagaaggaaacctatgactacatcgagaagctcggtgacgacacttcgattgtccgtggggtaacttgggtgtacaaccaagggtctgccgttggtggcgagactactatactcatcgataaacctacccgcacgcttgccgttccttatatcgagattaatggtagtcgccaagaggttgggtatcacttctcgtttgacattgccacccagatgattaccttaacggaaccactggttaccggggacttcctgatggcaatgaccacagagtctagtgtacctctggaagaccttctagctaacccgactggtgcctcggctatcggtacctccgatggtcgaaacgttcaggcaaacatcgacgagcttcgctcagagttagacttcctgaaagacactacggtgctcgacgttcgccgttttggtgctgtgggtgatggtattgcagatgattacccggcgtttcagaaagcgtgtatcgctgcgagccaacttggcggggcaatagtccacgtaccgaccccaaaggtaaaatggaagattggattcccggtatacttgttcgaccgaacttgggtccggggtacaggcatcaactgtattgtagagttcactgacccgctgtatgcacgcaagtcccgctctgggttcgtcattgggtctggttacgaacagaaccgcgacaaggccattcagtgtcttaacgatggcacttgggccactaatggctcggtggtaaataaggacttcgttgaattggaccgagggcagtacgtacgcgacaaccctagcaaggtccagtcgagactgtgccgagtgtccgggatgtacctgaaagcttcgtaccagaacggtgctaccatgaagggcggctacgctgtgtctggtgccaacgcggtagactcagaggtatttgacatttggggtgaaggttggactgagattatcaacttcgggtctgacgtaccgccagctacgccaagttgtcacaacctccatgcgtacgacatcacgtgtgttgctcctaacgactacgagacgtactacagcgcagggttcattgcgaactctacaagctgctctattggccgattcaagcagctcagggcaatagctgatggttctcctcacggttcctgtggttccgtgaactacaccgagtattgctccttctacgatatcgacgtaccgagcttaggtcgtacagcctcgtctgagggtatccttgtgaacaactccaagggcgctgtgactcgtaacgttcgtattggtaacgctaagaccggggtggccgagtattacaccactggtgctggtatcttctatgacagagaccaacccaacgtgttcgatagtatccatgcgaataactgtgacaacgcggtagctctccgctccaagttctcggtttggaagaacgtgacgcagaccaactgtacctatcacgtctacttcgggacgaccaacgcacaagcctgtgtggtcaagttcgtaccggacacaatcggtggtggtaataacgtagacattctggacaggctccgcgataacgttgtgactggctggcgtgtgcgctcgctccacatccgccccatcgcctacctactgaacgacaagtcagtgttgcgtagctgggatgctggtaagaacatcaaggctgagaacggtgtgggattccagtggttattccctgtaccatctaccatgcgtgcaatcactcaggtcagccaatggtttaccttcgaggtgggtgcagcgacggccgggacagaggtcaaggttcaggttcgccgtatgtcagcgtacaacggagacgccaacgagcagcctgtaatcctctttgagaacagccgaaaggcctctatggataccgtacaggcgaccaacgttgtagcgaactcttcgggtctggtcctgacgtcccctacggatggactggctaacgctgtggatgtcctcgtgagcgttacagcacctaccgttaacttcaacatgaaagaagctcgcattacgtatctgggcgactaactaaggagacagtatgttaaacaaattgaatcaacctaaaggctctacaatcggtgtgctcaaggatgggcgcaccatccaagaggcaatcgacgagctggagaagattaagacccgcaacgttgaccctgagcgcttccgtgagacgttgacgtcaagtgacgatgaggtattcgagaagctgttcgcgtggttggcaactcagtcagacgttgtgggaacctcaagttcttcatatatcacagccttacctcgcatgattgagctgggaggtcgtacctatacgttgactaagcgtcacgtgctggacggtaactttgggattcagaacggtactatcctgatgtccggtgagggtgagattatcatgggcctcgatgctggtactaagactcgtcgccacttccttaagtatgtacatttcgaatacatcggggcatccgaccgtagcacctctctggtcaccatggcgcgctgcttcaactctgtggtgctattctgcaacttcatcgctggcggtgataccgctcgcaacagagcacctcgtacccgttacggtctgttcgtagggtccacccgttgctggggcttccagttaatcggtggtgagtattacggtggcgactgtgcgttgcgtgttggacgcgctaacgaccacactgggttgaccattcgtcccggtacagttcaccactctcgcgttatcaacatgatgctgtgtaacccggcaggtgccgaggtgtctggctgtaacattgaacacgcagacaacggtgcgattggcttagggattacctcgggtaccaacacctcaggtaacgcagcccacggtgttcgcatcaacggtgtatacttctacaacaacggtaatggctccagtggctcaaacgtagcacctgcgaatatcctcattggtaaggacattccgggaaccgaaggttgggaccgaccgggagagttgattacgtcgagtcgaaacaccgcgcacagtattacagtgtcagagtgttatatcgtcagcccgaacaccgagaacgcttggcaggttaacgccctgtacggtgtgtcattcttggacaacaaagtgggcctcaaaggtgacgctacgattcacggtgtgtatgacggtacatgtgctaactgctgggctgtaggcaaccgagaccaaggcggcaaggtgttccagttctcctctacagcaaccaacgcgattctgactaccagaaagggtaagtggactccgaagattatcggtgagggtacagcaggtaacacgactctaagtgcttctggtggtgcgtactcgctggataacggaatggtgaccgtgtcgtgcttcgcagtggttgacactaaggacccaaacatggctggcaacctgaacatcaaactcccggtagcctgtgaggaccagcagcggggcggtacaggcatctcgttgacgaacgttccagacgtaccgagcccgaatggtagcatcattgtaataggagacaccgctcgaatcatgctggggtctgcgagactacagccagcaaacgtcacgaccggtaccgccatccacttctcggtgtcctacccagcagacgttaaggtatgaggaggtaacatgctgtccctagacttcaacaacgaagttatcaaggcggctcccattgcgggggtcgctggggccgatggtgtagcgaggctcttttggggcctatcactcaacgagtggttctacgtcgcggcaatcgcctacacagtggttcagattggtgccaaggtagtcgataaaatcattgattggaagaaagctaataaggagtaacatatggacctgattaagttcctcgaaatgttagacactgagatggctcagcagatgctcatggacctgaagaatccagagaagcgaacccctcagctgtacaacgccattggtaaactactggagcgacacaagttccaaatctcgaagctgacccctgacgttaacatcttgggcggactggctgagggtctggaggcttacaactccaaggttggcgcggatggtctgacagacgacgatacgttcaccttacagtgactgacagacgacgatacgttcaccttacagtgatatactcaaggtactactatatgtagtgcctttatggatgtcattgcactacgctaggcgttcctacgtgaaatctgagaaacaacgggaggcattatgctggagttcacaaagagaatcgtcccgtatcttgtggctatcatggtgtttgccttcgggtggcacttggggtcacaatctacggacgccaaatggaaggaggaagtacagaatgagtacgttaagaagcaaacggctagagttgaaactcagaaagcgattgacgcagtatcggctaagtaccaagcagaccttgaggggctggagggcagcaccgataggattattgctgatttgcatagcgacaataagcggctgcgcgtcagagtcaaacctaccagtgtcaccgcaggaccagacggtcgatgcctcgttgatggttccgtcgaactacacgaagcaactgctcgaagtcttatcgcaataacccagaaggccgaccttaaagagaaggccctacaggacactattcgtaagctacagcggaaaggaggtgaacattgagtaactctcagcaagccaagaacgccttaatcattgcgcaactgaagggtgactttgtcgcctttctcttcgtgctctggaaggccctgaacctgccggaaccaaccaagtgtcaaatagacatggccaagtgtctggcagaccccaagaacaagaagttcatccttcaggctttccgtggtatcggaaagtcgttcatcacgtgtgcgttcgtagtgtggaccctatggcgcgaccctcagttaaagatactgattgtctcagcatcaaaggaacgtgcggacgctaactccatcttcatcaagaacatcatcgacttgttgcctttcctgagtgagcttaagcctcgccccggtcagcgtgactccgtgattagctttgatgtaggccctgccaagccggaccacagcccgtcagttaagtctgtgggtattacgggtcagcttactggtagccgtgccgatatcatcattgcggatgacgtggagattcccggtaactctgcaacccaaggtgctcgtgagaaactctggacgttggttcaggagttcgccgcactgttgaaacctctaccgactagccgtgttatctatctgggtacccctcagaccgagatgacgctctacaaggaacttgaggacaaccgtgggtactccaccattatctggcctgcacagtatccccgctccaaagaggaagacctgtactacggcgaccgtctggctccgatgctccgcagtgagtacgatgaggacaaagagggcctcagtagtcaacctaccgacccggttcgattcgactctatggaccttcaggaacgtgaggtggaatacggcaaggctggctatactctccagttcatgctcaacccgaatctcagtgacgccgagaagtaccctctacgcctccgtgacgctatcgtgtgcggtctacaggcggacaaggccccaatgcactaccagtggcttccgaaccgacagaaccgcaatgaggagcttcctaacgtgggcatgaagggtgacgagatttactccttccatacagcctccagtaacactggtgcgtatcagggtaagattctggtcattgaccccagtggtcgcggtaaggatgagactggctggtgcgtactgtacaccctcaacggttacatctacctgatggacgctggtggtactcgtggttacgaagagaagtccctcgagttcctcgctaagaaggccaaacagtggcaggtacagactgtggtcttcgagagtaacttcggtgacggtatgttcggtaatgtgttccagcctgtgctcctgaagcatcacccagcgcaactcgaagagattcgtgctcgtggtatgaaagaggtccgtatctgcgatacccttgagcctgtactggcaagtcaccgcttggtaatccgtgacgaggtcatccgacaggactaccagacagcacgtgatgcagacggtaagcacgctctgaagtacagcctgttctaccagatgacccgtatgagccgtgagaagggagctgtggcacatgacgaccgacttgatgcgttagcattaggtgtcgagttcctacgctctacgatgcagcaggacgctgtgaagatagaggctgaggtacttcaggagttcttggagcaccacatggagaagcccctgagtaacatctcccagttccgggccaccagtagcaacggtgtggacatccgatgggaagacgacggggatgacgctatgttcatcgcatggtaactatgcagtgattgtgcataaggattcattaggccacggaaggccacttttggaaaactctaagtataacagacacttggaattaggtagcactatagggagagacccaaggttacatactataagactacttaaagtttcattcatatagatatgcactttaagtctccttaaaggcagagggtagtgatgataatatcaccctctcactataagacactaagagctaacacaaggaggacctatgcgcttactgttaaccttactgcgccataggactacttggcgatttctgctggtacttgctggtgcccttggggcttcactggttactcagcagcaactcagtggactggagactatcgtgtgctctctactcacttgtagcgattagggtcttcctgacgcgctagggattccgtagtgatgcttatcagcatacaccactccatccctctatagtcaatacttaaagttaaccttaggtgattcactgggtctacctacgggtctatgcaatgacctgaggaatacctgaggttacctttaagaatatgacataaagttctgagtgtatatctcacagtttaaacttttggttatccccccggtaccctctcagttcacccaaagtaaccataggccaccctaaaccttcggtttaaccttaggtgggactgatgggggaaaccttggggtgatactatatgttgtggtgagtgggaccttgggatactatatgttgatgtctctgtgtccc

SEQ ID NO: 13 - DNA, 40708 bp, Unknown
  source: /note="Description of Unknown: KP3W-P0113 Bacteriophage sequence"
tatctgttgaccctctttaagtatccactagtcacacctgaggagccaacctgaggttagacctgagaccatataccttaggttaaccgtgtgaccatccagcgagtcatcactataaggttattcagtggtcagtgtcaatatactaaacaattaggtatcactatagggagacactttaagtattactaagagaccatcaccataaagataactatcactataggtctacataaagtttaacttaaggtattgacattcagaatccgttatgagacattagcaaccgttgagagacacaacgtcatcaacgaccagacaataccacgagttatctggttagactgagggtctcaagtagtcatcaaccggacatacgaaaatggttgactcaacgatgaacaagtagtaagatgcaccacagattcacagcaacgaagtatcgctaggcaactagcattgctctttaacaatatggattagtcgctgatatgtacatcactcatcacttagtgtttaactagtggtcacattcaggtctctggcaaggtacgtcctgtcaccctgagagtggccacgctgataaccactaatcaactgaaggatatacaccatgattcacatgaaagaaccagccaacaaagtattcgcattcgttaccgcttaccgtggctatgagtcgctcgaagttaacgagaagatgctcaagggtctaattcgcaccattaagacctatccgggagcgtatggcaacattcgtgatgagaacgtacaaggatgctttaaggaggctggtatgcctgaggcaacgcaagagcgcacgcttaaggtggaatgtaccatcaaacaagcggctgagctggcgtggttagcatgtaagacctaccatcaagacgctgtactggtggttaactcacagactcacacggcctctctgtggtctatcgaggacgtaggcgaatatcctcaggtatatccacgcttgaaagaggtgtctttaggtggcacgctgcaacaagtggatgcaccgaagggcgaatgctactcggtcatcaacgggcaatactgggaggtggtgtaatgagtaagctactagcgatatccaaaataacagggcaatacactgtaacactacgggagtacccgcacggtaaaatggggagtacctacactgtgcgatacggtaagcaggtaaaacactgggccaacgtggtactagctcaggaggattatcaatcgtgcgtagtacatcaattaacttgcgctgggtggaatgactgatgaaacactacggaatcacacagcaggacctcaagatcactcgcaaggccatgaaggtggccttgatgtatgtcaaccagtcacctgaagacatgaacgcatggcacggctactatatggcccagctggcagcaatttatcatactcgtaagataatgtatgctaaccctgttcgtaattagcgtgtacgccctgattgtcctgtactttgtgcgggacttttgcaagggtctcaaggtacacaaagcatcattcagttacctgaagtggggcttcttgcctcgctttactgtacgactacctaatggccgctttaaggcaaacaaggtaggcattttctacatcgcaacccattgacacgccataaggaaacaaccaaatgaactacaccgacatgcaagaacgcttagacgtcatccgtaacctgtcaatctgtgaactcgacaagcgccaaccgctattggttgcactcatcgcggacattgtgaactacgagacgtccgatggtgacgatacggatagcgattggggtctggagcgacaggactactggcaaaccctgaagattaaggccaaagacgctggattcaacctgctgggtaatggtcacttcagcgcagcgtttaagcacgagctgctgccgggtagggtcattaaggttggatttaagaaagaggactcaggggccgcctacgtggctttctgtcggatgcatcaaggtcgggtagggattcctaacgtctatcacgtagcgcgccacgctggctgctatacggtggtactggatgagcttgagccttgtcaacgcttcgagaacgaggtgcacgagcattacgcagaccttgcgagctactttgtggagaactctggtgcagagttgggcgatgttgacggtgcagagaaggaattacccttcgtcgagacgtgccaaatgattaacaagttcttccacgggattgcatcctttgacatgcatagtggtaacatcatgttcaccaaagacggcacgccagtgattaccgacccggtgtcattctcagcggaccgggaccgtgagcctttctcgctggaacctgaggaactgctcgcagagattgagcagatagcgcacgccaagatgattgaacgctgtaagcgcaacaaggctaagcgtgacccgaacggggagctgcgcatcgcacgccgtaaggccaataaggagcgtcgagcatgccgtaaggcacacgctaggtggcgcaaggagcgcgagcggattaacgccgaggccctaaagttcaaccttgcgaaaatcgaggaacgagtacatgcatggatggctcatgagggtctagccattcagcagggtaggggccttccggttgacaactaccttcagggtagacttatgggttagcaaggtgtatcttaggtgtctctcacgcaagaggcaccaatagataaactttattaacgccagttcgctggcaccaaagaggcacataatgaacgcattaaacattgcacgtaatgacttctcagagattgaactagccgctatcccgtacaatatcctcagcgagcactatggggacaagctggcacgtgaacagctggcccttgagcatgaagcgtacgagctgggcgagcagcgtttcctgaagatgttggaacgtcaggttaaagctggcgagttcgctgacaacgtggccgctaaaccgctggtcttaacgctgcacccgcagttaaccaagcgtattgacgactggaaggaggagcaagcaagcgctcgcggcaagaagcctcgcgcatattatccgattaagcacggtgtggcctcagagttagccattagcatgggcgctgaggcgctcaacgagaagcgcggagtgtccagtgaggctatcgcactgctgaccattaaggtcgtcttagggacgctcacagacgcctccaaggccactatccagcaggtgtcctcgcagttaggcaaggcccttgaggacgaggcccgcttcggtcgtattcgtgagcaggaagccgcctacttcaagaagaacgtagcggaccagctggacaagcgtgtaggccacgtgtacaagaaggctttcatgcaggttgtcgaggccgatatgatatccaaagggatgctgggcggcgacaactggtccagctggaagaccgacgagcagatgcacgtggggaccaaactgctggagttactcatcgagggaactggtctggtggaaatgaccaagaacaagatggccgatggctccgacgatgtgaccagtatgcagatggtccagctggctccggccttcgtggaactcctgagcaaacgagcgggagcactcgcgggtatcagtccgatgcaccaaccgtgcgtagtccctccgaaaccttgggttgaaaccgtaggcggtggctactggtcagtcggtcgtcgcccgctggcgctggttcgtacccactccaagaaggcactgcgccgctacgcagacgtgcacatgcctgaggtatacaaggcggtaaacctcgcgcaaaacacgccgtggaaggtgaacaagaaggtactggcggtagtcaacgagattgtaaactggaagcattgcccggtgggtgacgtcccggcgattgatcgcgaagagttaccaccacgcccggatgatatcgacaccaacgaggtggcacgcaaggcatggcgtaaggaggccgcagcggtataccgtaaggacaaggcccgccagtctcgccgtctgtcaatggagttcatggttgcacaggccaacaagttcgctaaccacaaggccatctggttcccgtacaatatggactggcgcgggcgtgtgtacgctgtgagtatgtttaacccacagggtaacgacatgaccaagggtatgctaacgctggccaagggtaagccaatcggtctcgacgggttctactggctgaagattcacggtgcaaactgtgcgggagtcgataaggttcccttccctgagcgcatcaagttcgttgaagagaacgagggtaacattctggcgagcgcagccgacccgctgaataacacttggtggacccagcaggattcgccgttctgcttcctagcgttctgctttgagtacgcaggcgttaaacaccatggcctgaattacaactgctcgctaccgctggcgttcgatgggtcatgctctgggattcagcacttcagcgcaatgctccgcgattccatcggtggccgtgcggtaaacctgctgccatctgataccgtgcaggatatctacaagattgtttccgacaaggttaacgaggtgctacaccagcacgttgtcaacgggtctcagacggtggtcgagcagattgccgacaaggagactggggagttccgcgagaaggtaacgctaggtgagtccgtaatggctgcgcagtggctgcaatatggcgtgacccgcaaggtaactaagcgttcagtcatgacgttggcgtatggttccaaggagttcggcttccgccagcaagttcttgaggacaccattcagccagctattgataacggcgagggcttgatgtttacgcacactaaccaagcggctggctatatggctaagctgatttgggacgctgttactgtgaccgtagtggccgctgtcgaggctatgaactggttgaagtctgccgctaagctgctggccgctgaggtcaaggacaagaagaccaaagcggtgctccgtaagcgctgcgcaatccactgggtgacaccagacggcttcccggtgtggcaggaataccacaagcgtgaccaagcgcggttgaagctgacgtttctgggtcaggccaacgtgttcatgacgtacaacaaaggggacaccaaagagattgacgcgcacaagcaagagtcgggcatcgcgcctaactttgtgcactcacaggatggtagtcacctgcgtatgaccgtagtgcacgctaacgaggtctacgggattgactccttcgcgctcattcacgactccttcgggaccattccggcagacgctgggaatctctttaaggcagtccgtgagaccatggtcaagacctacgaggataacgatgtgattgcagacttctatgaccagttcgctgaccagctgcacgagtctcagctcgataagatgccagaagttccggccaaaggggacctgaatctgcgcgatatcttagagtctgacttcgcgttcgcctaaggtctccggtaattaggtagcactatagggaaccttcgaatgaccgagggttccattacttaaagtcttaacttaaagaatacttaaagaggcacgccatgtaccagaacacaatcaactttgagcgcacccgtgaacgtcagcagaccgagggctatattcctaagggtcgcaagctgaacaagacaaagcgcggtggaggtgtgaaaggttctttccgtaacgccaagggtgacagcgttgttaaccaagagaaatacttcgtaggagcgtaacaaatggctgagcaaactaaatggctgttcgatgggagcacatcacagtggtcacggctaggctacacagagcgccgactttttgaagacactgggttgacggtcattatgactcaagactggagcacacaaggtgttacactctcggtgcacgagccgcgcctctatggtggtcaatacctagtagagaagaccttcagtcgatggtcaattgactcagcgtcagactggctggcaaaactcatagccgactacgcaagctggaagtagttaggtagcactataggcagactcaaggtcatcggattacggtggcctttatgattgcttattgcacactaaatgaacactacacttcggagacagcatcatgatgaacattaagaccaacccctttaaggccgtatcgttctcccgctctgctatcgagaaggcgctggagacttccggttacctcatcgcagacactaagcacgatggggttcgcgggaacatttgcgtagacaacacggccaacgcagcgtggctcagccgggtctccaagaccattccggcccttgagcatctcaacggtttcgaccagcgctggcagaagttactgaaagatgaccgctggattttccctgatggcttcatgcttgatggtgaactcatggtcaaaggcgtggacttcaacaccgggtctggcctactgcgtaccaagtggctaaagaaatacaacatggagtaccacaacgtgccagtaacaccagacatgctgaagcctcgcaaggttggcgttgctaagcgtgttcgtaccgagtttagactatccgccgcgcacctcaaagttgtcctctacgatatcattccgcttgacattatcgagtccggtgatgactacaacgtgatgaccctcctccgccttgagcacgtcaaggtcgtcttaccagttctgcaagaccacttccctgaagtcgagtggtgcctctctgagtcccatgaagtttacgacatggacgaactcgatgcgctttatcgacagaaacgagaagaaggtcacgaaggtctggtggttaaagacccgcgaggtatctacaagcgcggtaagaagtccggctggttcaagtgcaagccgaacgatgaagccgatggaatcattcagggagtcaattggggcactcccggtcttgcaaacgagggcaaagtcatcgggttctctgtgcttcttgagacaggtcgtttagtagacgccaacaacatctctcgcgcactgatggatgaatttactgccaacgttaaggaacacggcgaggaatgctataacggctggtcttgccagattggctatatggaggagacgaaagatggttcattgcggcatccatcattcacctgcttcaggggaactgaggacaacccaagcgagaaaatataagtatagcaaagcggctccttcgggagtcgtttcagctactggtaagccaatcggctataagcgtaaagacaggtactggctgttatcatatggcggaagccatagctgtacgagacgcagttattaattaggtagcactataggagacaacaatatgtccatcaatctgattctaatcatcgtgttcatcctcgcggctatcgtgtggtcaatgaacgacgaaccaccatatagcggaggctaaaccatgcgcttacacttcaacaaatccaacggtatcttctcggttcgccgggaggaccgcagcaccgtagcagccactgagcgccacggtaagattccacgtatcggggacaccttcgagctggcacccagcgtgcacattttggttactcgcggtctctacgaattggctcagactaagagccgtcctttcgtacccgtggttgtgactaagtggccacgtcttcgtctgttctgggagcgtatcaaggaggtggttaatgagtgagcacaaggaccactatgcatcactgcacagcttccgagcgtgtgattgtggtgctgtaccagtacgtaacaccattcccattggtaccgttgatgacggtgtcaaacagccaagtcattaccagctgttcgaaggcgtcgaggccatcgaggttattgctcgcagcatgacccaagagatgttcaaaggttactgcctagggaacatcctaaagtatcgccttcgggccgggaagaagtccgagctggcaaccttagagaaagacatggcgaaggccactttctatctggagctgtataccaagcacaagggtctatgctatgacgccgagtgactggtgccgagcgatgtacgagaagacgctcgaccctgcgtacatcaccctgtataacatgtggaaggagcgagaagatgcaaaagttcgtcgtaacggtcgagacagctaacgcatcgtacgaactcccggtacacgctgggtctcttgaggaggccctcgaagttgccgaggcggagtacgaagagttaggccaagtgactcgggtacgcccggatactaatttcgggtacgacctgtagtcattaggtagcactatagggacagcctgtccctcttactgtttaaacttaaaggagattcatcatggcattcgctaagaagaagatttataccaccaagattggtacctgtgagccgtatgcttacttcaacaagccggactatggcggtgatggttttgagaacccacgcggtacctacaaaggttccgtaacgttcaagaacgaagactgtcaggagctggtagacctcattgttaagacccatgaggaaaactacgcggcacgtctggaagcgcatgaagcgaacccgcctaagtttcagaagggtaagaagcccctgaagccgtacgaaggcgacatgccgttcttcgacaacggtgatggcaccaccacgttcaacttcaagtgctatggttcgtacgaggacaagaagactggtgagaccaagaagattgttctgggtgtagtagatgctaaaggcaagcgcatccaagacgttccgatcatcggtggtggttccaaagtgaagattcgcttctcgctgataccttacggctggtctgcggtagctggtgcttccgttaaattgcagctggaaggcgttatgctggtcgaactggctacctttggtggtggcgaagacgactgggctgacgaagccgtagaaggcggttacgaagctgacgaatctcgcagccgtaaacctcaggaagacccggaagactggtctggcgaggaagctgacgagggtgaagctgaagaagacgatgacttctaatggctggctatggggccaaagggattaggaaggtgggtgccttccggtctggccttgaggacaaggtgtccaagcagttagaatcaaagggcgtcacgttcgactacgaattgtggcgcatcccttacgttattcctgcgagtgaccacctttacactccagacttcttgctgcctaacggtatcttcgtggagactaagggtctctgggaagccgaggaccgcaagaagcacctattgattcgtgagcagtacccggagttagacatccggttagtattctcttcgagtcgcactaagatttacaaagggtcgcccaccagttacgctgagtggtgcgagaagcataacatcttgtttgccgacaaattgattcccgtagactggctgaaggagccgaagcgtgatgtaccgttcggcaagttcaagcagaagaaaggagcaaagtaagtatggctaaggttcaattcactaagcgacaggagacctctcagattttcgtgcactgttctgccactaaggcaaccatggacattggtgtccgtgagattcgccagtggcacaaagagcaggggtggctggacgttggctaccacttcatcatccgccgtgatggtaccgtagaggcgggccgtgaccaagatgctgtaggttcacacgtcaagggctacaactcgacttcggtcggtgtgtgtctggttggtggcatcgacgctaagggtaaccctgaagcaaacttcacgccagcccagatgcagtctctgcgctcactgctggtagaactgaaggtgcaatactccggggcagtgttgatggcacaccacgatgtagcaccgaaggcttgccctagcttcgacctgaagcgctggtgggagaagaacgaattggtcacttctgaccgtgggtaaacattaggtagcactacagggagacaattgcgtttccctgttgtcgcttgaggagattactttatgaacaagttcaaagagcacttcgacccaatcccattcctagcgtacgggctgttaggcttgtgggcgctatccttcgtggtctcatttatcgcatcatgcatcaacggtacctcgttatgagttacggagactctcaagaagatgggcaggagagtatcttcctgttccacgctccgtgcgaaaactgtggttcttctgatggtaactcagtgtactctgacgggcacgagtactgcttcgtgtgtcaacaccgggttcccggctcagaggaacgtaccgaaaagttatcatcgagaagacccaaaggagggaattacgggatgaatacacaaggttcaggcttattggtattcggcgagaatgatggtcggtacactgacctgacggctcgtggtatctcaaaggcgacatgccagaaggctggctattgggtcgccaaggtcagagggactgcctatcaggtggccgactatcgtgaccagaatggctccatcgtctctcagaagctgagggacaaggagaagaacttctctaccagagggtctcacaaaggggatgcactgttcggtaagcacctatggaatggtggcaagaagattgtcatcaccgagggtgaaatcgacatgttaaccgttatgcaacttcaggactgtaagtggcctgtggtttctctcggtcacggtgcgtcagccgcaaagaaaacttgtagcgcaaactatgagtatttcgatagcttcgaccagattatcctgatgttcgatatggatgatcccggtcgtgcagccattgaggaagccgctcaggttctccctcccggtaaggtacacgtagcggtactgaccgagaaggatgccaacgagtgtttactcaagggcaagggcaaggaggttctcgaccagatatggaacgcggccccttgggtgccagatggtgtaattggtgctatgtccatgaaggaccgggtgcgagaggccatgaccagcgaacagagcgtgggataccttttctcgggatgtccgggactgaacgaccgaaccttgggtgcacgtggtggcgaagtcatcatggtcacttctgggtcaggaatgggtaagtctacgttcgttcgccagcaggccctagggttcgccagaggtcaaggactgcgggttggcatggcgatgcttgaggagtccgtagaggagaccatggaggatgtcctagggattgctaacggtatccgcttgaggcagcagcctcgggagttcaagcagaaactgatagaagacgggacgtatgacaaatggttcgatgagctgtatggcaccgaccagttccatctctacgactcctttgcggaagctgaggtggaccgcctgctggccaagctgcattacatgcgcacagggttgaactgtgacgtaatcattctggaccacatctcaatcgtagtgtcggcctcggaggaatccgatgagcgcaagatgattgaccgactcatgaccaagctgaaagggttcgctaagtcaaccggagtggtacttattgttatttgccacctgaagaacccggagaaaggtaaagctcatgaagaaggacgtgctgtttccattactgacctgcgtgggtctgggtctctgcgccaactctctgatactattattgcacttgagcgtaatcagcaaggggatatgcctaatcttgtcctccttcgtattctcaagtgtcgctttaatggtattggcgttggcattgcggggtacatggagtacaacgaaaagaccggactccttgaaccgtctagctacactggcggcgatggagagggtcattctggctcgggtggagttggaggaactggctgggaaggccacgaagaagacgactattgaaccagactggaagttaacaacacaatgtaattgcccatgggatagaccgtgcgtctgtcctgaccgggcttaatcaacctgaggagaaccatcatgtttaaacttatcgaagcattaggccgtctggtcatcgcactgtatgtacgtgaagccaaggcactggacaaagcgtccaaggtggaagcagaagcagccgctaagctggctaaggccgccgacaaggcacgtcaggcatctcttgatgcaaccgcagaggcagcgaaagttgcacttaaagctcagaaacttaaggagttcttctaacccatggacatttacgtgctagtcggtatgcttattggcgtcctgctcatacacctatcaacataaggagttcttctaatgactaccaaagctaaattccccggcaacaccattcagctgtccgacactgtagaccagtggggccgcaaggttcacatcaacgtacgcaacgacaaggtaactctggtctaccgctggaaggcaaagagcgataaccgtgctcacactcagcgtgtgaccctagacgatactcaagcagctcgactgctggcatccgtagccgtagccgctactgtggccatcggtgaggacaaagttcgtgaggccatcctgagtaaagaggtaggctcaacggcaacccgactggccgaagcgtcagaagctaagtgataaactcaaggtcattactatatgtagtggcctttatgattatcacacacaacatattgagaggacataaccatgcgtaaacctgaagaaatccgtgcagacatcgagaagctgaccaaagagctggaagctgttaaggttcatgagtccagacaggttgctgctgttaacatcctgtataacttagggtggaaacatgacaaccttaatggatggcagaagcctgctccgaagcgtagcgactacaaggcaccactgaaggctggcgagctggcaacgtgggaggacggtcacatttatggaaccgtatatatccgcagagtcggtaacaaattctctcaggtgtcttacgtccgtggtgttagtcgtctgggtattgacgtccttacaggcagcttcgacattgagaacagtaagctgaccatccgtccacgtgagtatttcatcgggcgtcgttaagcaacaggagaccactatgttagtatccgatatcgaggctaacaacctcttagagaaagtcactcagttccactgcggtgtcatttatgactacagcacggacgagtacgtatcgtatcgaccttgggacttctcagcgtatctcgatgcgttggaagctgaggtggcgcgtggtggtctcatcgtattccacaacggtcacaagtacgatgccccagtgttaaccaagctggccaagctccaattaaaccgagagttccacctgccgcgtgagaacgtagtggacacgttggtgctcagtcgtttgctgtttgcgaacattaaggacaccgatatggcgctgctgcgttccggtagattacccggtaagcgcttcgggtctcacgctctggaggcgtggggttaccgcttaggcgagatgaagggtgagtacaaggatgacttcaagaagctccttgaggaacagggagaggactatgtggacggtgctgagtggattagcttcaacgagccgatgatggactataacgttcaggacgttgtggtgaccaaggcgctcttagagaagttgctgagtgacaagcactacttcccggatgacgttaactttaccgattgctgtactgatgccttttggtatgattcctgcgaggccgtctggctggagcacagagctgcgtggttgctcgctaagcaggagcgtaacggcttcccgttcaacaccaaggccatcgaggaactctacgttgaacttgctggtcgtcgttctgaactccttcagacactcaccgacactttcggaacttggtaccaacctaagggcggcactgagttattcctgcacccgcgcaccgggaagcctcttggtaaatacccacgagtgaagtacccgaaacagggtggtatctacaagaaacccaagaacaaagctcagcgtgagggtcgtgaaccctgtgagctggacactcgggattacgtagagggtgctccgtacacaccagtagagcacgttgtgtttaacccaagtagccgagaccacattgcactcaagctgaaggaagccggatggatacctacagagttcaccgacaagggtgcacctaaggttgacgatgaggtccttgagcatgtgcgtgtggacgaccctgagaagcagcgctgtattgacctcatcaaagagtacctgatgatacagaagcgtatcggtcaggcagctgagggtgacaaagcgtggctacgttacgttcaagaggatggtaaaattcatggttcagtcaatcctaatggtgccgttacaggccgagcgactcatagcttcccgaacctcggacaagtaccgggtattcgaagtccttacggcgagccttgcagggctgcttttggtgctgagcatcatcttgacggcctcactggtttaccttgggtacaagctggcatcgacgccagtggtctggagctgcggtgtctcgcccacttcatgtccaagtacgacgggggagcttatgcagatgttattcttaacggggacatccacacagtaaaccagcaggctgctgagctgcctacacgcgataacgccaagacattcatctacggcttcctctatggtgctggtgatgaaaagattggacaaatcgttggagcaggtaaggaacgcgggaaggaactcaagaagaaattccttgagaacaccccagcaatcgcagcgttgcgcgaaggaatccagcagaccctcgtcgagtcatcccgatgggttgccggagagcagaaggtcaaatggaaacgacgctggattaagggactggatggaagaaaggtacacgtaaggtcaccacatgccgcgctcaacacgttgcttcagtcagctggtgcgctcatttgtaagctctggattgtcgagactgaagagttgcttctcaaggttggcttgaagcacggctgggatggtgactttgcatacatggcatgggtacatgacgaaatacaagtagcgtgcaggactcaggagattgcacagcaggtgattgacatagcgcagcaggctatgcgtaacgtgggtgaccacttcaagttccgttgccgtctggacacagaaggtaagatgggtccgaactgggccgtatgtcattaataatacaggagatttatcatggctatgactaaacgtttcaaggttactttcgaggtgaccagcgttattgatagtgagtccgagaagaacctcggcgagaccgttctacgtgttgcacgtatggttaccagtggcgagaaggtggacaacttcaaactgggcttccttgaggcagccctcagcggtggacctgatgaagcggctgcgtactgcatccgacatggcctgcgctcgatggtcaaagaggcacatgacgacctttcgtttgacgagaagaaacgtatgcgcttctctccagcaatcgtgagggtgaccaagtgagcgagtacctcaaagttcttgcggccctcaagggctgccctaagtccttccagtctaactacgtgcggaacaacgctacgttagtcgcggaggctgcgagccgtggtcacatttcgtgtcttaccatgagtggtcgtaatggcggcgcttgggaaattaccagtgccggagtgagattccttaagaaacacgggggttgcttatgagtaacgtcaccattagttcagaccgccttaaatacttagagagtcgggacgaaatcctgagcgctcttgaggcaggcggcgtagataactgggagtggtactcagagtcgttgcaggaagcagggcttctggatgacgatgaggaggaagacgatgaggaggaagacgaggaggaagacgatgaggaggaagacgatgagtaagcacacattgttatccttcagtgactaccgggcaacccagaagattgccaagggtgtccttgtgatggatggtgactggctggtattccaagccatgagtgccgctgagttcgatgcctcttgggaggaggagatttggcaccgttgctgtgaccacgctaaggctcgagagattctggagaactccattgaatcctacaaagggcgcaagaaggcgtggaagaatgcagacgttgtcctagcgttcactgaccgtgtcaactggcgtaagctgctggttgacccaacgtacaaagagaaccgcgctgtaaccaagaagcctgtgggttacttcgagttccttgagtccgtcttcgagacctacacgtgcgtccttgagccgcagctggaaggcgatgacgtgatgggtatcatcgggtccaaccctctcccgtaccattacgagaaggccgtactggtctcctgtgacaaggactttaagaccatcccggattgtgacttcctatggtgtacgactggtaacatcctcgtgcagactcaggagacagccgactactggcatctcttccagactatcaagggtgacatcaccgatggctacggtgggattcccggatggggagataccgctgaggacttcctcaaggaaccattcattgtggagcctgtaacgtccgtcctgaagtccggtaagaacaagggccaagaggtaaccaagtgggtgaagcgcgcccctgagccgggagagacgctctgggactgtattaagtccattggtgccaaagcagggatgaccgaagcggaagtaatcaagcagggccagatggctcgaatcctccgttctgatgagtacaacatcgagactggggagattactctatggcaaccgggcagctgattcttatcatcctgaccatgggcttagtcgctcgtggtctctggatgttggccttagttatcaagcagatagcttaccacaagcgcaagtgataaactcatgggcactaattaggtagcactatagggaagtgcccattatgattattactcaaagattacttaaagaggagactcaaatgttaaaacctatagagcacatccttaacaatcctaatgaccttcctgacgtaccgcgagctgtcaaggagtatctacagtctcgattcaatgctgacttcctgtatcaatcaggggtccgtaagcttcgtgaggctggtcacagtgaggagttcatctccggggtactgtatggtcaccacatggcttcgcgtgtccttgatgagatggagggccgtcagcgtgcactcaaagaaggagattgattatgtgtttctcacctaagatgaaagcacctaaggttgacacaacgactgtccctgagccagcgccactaaccgaggaacctaagggtatccagtatggtggcgacgaggattcaaacagcaccactcctgaggtgtcagggcgtaagtcactcaaggtgaccaagacgaccgagcctacagggtccgtcagtaaaatccgtaagtcagctttaggaggctaacatgggactgttcaagaaaatcaagaaggctatctccaaggtagtcaaagcgccactcaaggccgtgggtctggcagcagatgcacctaacgtgcagacagccgctgagacacctgtggccgcacctcaggaagcaccgaaagaggtcgttgaggacgttgagtcttcagcagacactgagtctggcaagaagaaaactcgtgcctccggtaagaagtccctctcagtttcccgcagctcaggcggtgggattaacttatgactccgtgcatcatatggtatggagctaggtcctcagcagggtacggacaggttcgaataaagggtaagacggtatacgtccatagattagcttatcaagaagtccacggtgaaattccaaagggacttgttattcgccacaagtgtgacaacccgtcttgttataacgtagaccatttaatccttggcacccagcgtcaaaacatgcaggactgctctgttcgcggtagagtgaacaaaacggttaaagctactggggagttgcagggtttatcaaaactaaccgaggctgatgtcaaactcattagagaatctacgctaagcggcgccaagttggcaaaggaacttggtgttgctaaaagtacggtaaacagagtacgctccggtaagacatggaggaacacatgatggcagaagttaaactagagggttttgccgaggaaggtgctaaaagtgtttatgaccgtctgaagaacgaccgacaaccttacgagacacgagcagagtcctgtgcgcagtacacgattccctcgctgttccctaaggactccgataacgcctcaaccgattatacgactccgtggcaatccgtaggtgctcgcggcctgaacaacctagcgtccaagctgatgctggccctgttcccgatgcaatcgtggatgaagttgaccattagcgagtacgaagcgaagaaccttctgggtgacgctgagggtctcgctaaggtagatgagggtctctcaatggtagagcgcatcatcatgaactacatcgagtccaacagttaccgagtgactctctttgagtgcttgaagcaactgtgtgtggccgggaacgccctgctgtacttaccggagcctgagggttatacccctatgaagctctatcggctgaactcgtatgtggtacagcgagacgctttcggtaacgtactccagattgtcaccctagacaagattgcgtttaacgctctccctgaggatgtccgcagccaagtggaagcagcccaaggtgagcagaaggaagacgctgagattgacatctacacccacgtgtatctgaacgaagccggggatggttactcgaagtacgaagaggttgccgaagaggtagtaccgggcagcgaagctgagtaccctctcgaagagtgtccatacattccggtccgtatggtccgcatcgacggtgaatcctacggacgttcctacgtggaagagtatctgggagacctcaagtccctagagaacctccaagagtctatcgtgaagatggccatgattaccgccaaggttatcggtctggtagacccagcaggtatcactcaggtccgcagactcacggcagcacagtctggtgcgttcgtaccgggccgtaagcaggacattgagttcctccaattggagaagtccggtgactttaccgtagcgaagaacgtaagcgacaccattgaggctcgcctctcgtatgcctttatgctcaacagtgcggtacaacgtacaggcgagcgagtcacagccgaagagattcggtacgtggcgtcagagctggaagatacccttggcggtgtctactcgattctctcgcaggaactccagctgcctctggtaagagtgctcttgaagcaactacaagccacgcagcaaatcccggagttacctaaagaggctgtcgagccaactatcagcactggccttgaggctatcggacgcggtcaggaccttgacaagctggagcggtgcattaacgcatggtctgcccttaaggctctcgaaggtgatgatgacctcaacttggctaacctcaagttgcgaattgctaacgctatcggactcgacacagctggtatgctgctcactcaggaagagaagaacgcccttatggcacagcaaggtgctcagattgctacacagcaaggggccgcagcattgggtcagggtatggctgctcaggctactgcaagtcctgaggcgatggcagctgctgctgattccgtaggtatgcagccgggtatgtaattaggtagcactatagggagaccgattggtttcccctcttagtcttaactttaaggagattgaaatggctggcgaatctaacgcagacgtatatgcatccttcggtgtcaacagtgctgtgctgactggtagtacacctgaggagcaccaagaaaacatgttggctcttgatgttgctgcccgtgatggcgatgatgcaatcgagctgaacaccaacagtgatgacccatatggctccgatgtggacccgttcggtgaacctgaagagggccgtatgcaggtccgcatctcagctgacggttccgacgaagagtctaccgaaggtgaagagggttctgaagaagaacagcagggcgacgaagggagtcagccggaggaagtaaccgacgatggcgaacaagaagagttcaaaccgattggtgaaactccggctgacataaacgaagcctctcagcagctggaagaacacgaagctggctttaacgatatggttgccactgcaatcgaacgcggtctctcacaggatgctgtgacccgtattcagcaggaataccagaacgaagacagtttgtccgatgagtcctaccgagagttggccgaggctggctacagtaaggcgttcgtcgatgcgtacattcgtggtcaggaagctctggtcaaccagtacgtcgagaaagtgatggacttcgttggtggccgcgagcgcttccagcaggtctacggtcacatgaagaccaacaaccctgagggtgctgaggcactcatcaaggcttttgaatcccgtgacgtagccaccatgaagacgattctgaacctagcgggacagtctcgtgataaaacctttggtaagaaagctgagcgctctattgccaagcgtgcaaccccagcgaaacctgtggcccgtaaagctgaaggcttcgagtctcaggctgagatgattaaagcgatgtcagacccacgttaccgcaccgactccaagtaccgtcgtgaagtggaacagaaggtcatcgactctaagttttaattaggtagcactatagggagaccccagcgccgatgtaaggctgggacttctcccttcgagttacacaatgagtatcacctcgtttcaagtagtacctcaatagcttggcaacgataggcccgtctggtcagcgtaatgactattctattcgtaaacaacataaggagattcaacatggctatcacgcaaggtggacagcagctcggtactaaccaaggtaaaggtcaatccgcagcagacaagctggctctattcctgaaagtattcggcggtgaagtcctgaccgctttcgctcgtacctctgtgacaaccaaccgtcacatgcagcgtcaaatcagctccggtaagtccgcacagttccctgtgattggtcgcaccaaagctgcttacctgcaaccgggagagtctctggatgacaagcgtaaagacatcaagcacaccgagaagaccattaacattgatggcctgctgactgcggacgtgctgatttacgacatcgaagacgcgatgaaccactatgatgtgcgctccgagtacacctctcagattggtgaatctctggcgatggcagctgatggtgcagtactggccgagctggccggtctggttaacctcgctgattccgtcaacgagaacatcgctggtctgggcaaaccgtccctgctggaagttggcgctaaggctgacctgactgacccggtcaaacttggccaagcggttatcgcgcagctgaccattgctcgggcggctctgaccaagaactacgtcccggctaacgaccgtacgttctacaccactccagacgtgtactctgcgattctggctgctctgatgcctaacgctgcgaactatgcggctctgatcgaccctgagcgtggttctatccgtaacgtgatgggcttcgaagtcgtcgaggttccgcacctgaccgctggtggtgctggtgatgaccgcccagacgaaggcgcagatgcgaccaaccagaagcacgccttcccagaaactggtggtaaagtcaacaaggagaacattgtgggcctgttccagcaccgttccgctgttggtaccgtcaagctgaaagacctcgctctggaacgtgctcgccgcgctgagtatcaggctgaccagattatcgctaagtacgcgatgggtcacggtggtctgcgccctgagtctgcgggtgcgctggttttcacggcggcctaagcgtaaatacctttagtgctcgggtggtaactccacctgagtacgaggtacagactgtagccattgatggtgattcacttaaggtggcactcgatgggctggagagtgtaacggactggtcaacccttgaggtaacttatggtacttcagggattgtcagccatactcgccggaccaacacgctgtacttcaaaggaatcgctgtaggcgaaactctggtgactgtcagttttgaggggtctgaaaggaagacctttaagctggtcgtgactaactaataagccaaaccccttggggaccactcacggtctctgaggggttttttcgttaggagcttacattatgaacatgcaagatgcttactttgggtctgccgctgagctggatgctataaacgagatgctcgcagctatcggtgaatccccggtgaccacccttgacgaagatggtagcgcagacgtagcgaacgctcgtcgtatcctcaacaggattaaccgccagattcagtctaaaggttgggcattcaatattaatgagtcagcaacattgaccccggatgccagcactggactcattccgttccgtccggcctacctgtcaatccttggtggccagtacgttaaccgtggaggttgggtgtacgataagtcaaccaacactgacaccttctcaggaccaattaccgtgaccctgattacccttcaggattacgacgagatgcccgaatgtttccgccagtggattgtcaccaaggccagccgccagttcaactctcggttcttcggagcggaggacgtagagaactctctggcacaggaagagatggaagcacggatggcgtgcaatgagtacgagatggacttcgggcagtacaacatgcttgacggtgacgcatacgttcagggcctcatcggtcgttaatcagaaacttaaggaggaccaaatggctctcgtatcacaatcaatcaagaacctcaagggaggcattagccagcagcctgaaatcctacggtacccagagcagggttcacttcaggtcaacggttggtcctccgagactgagggtctccagaagcgacctcccatggtgttcatcaagtccttgggaggtcgtggatatcttggggaagacccctacatccacctcataaaccgtgacgaatacgagcagtattacgccgtgtttacagggaatgacgttcgggtattcgacctgtccggctatgagtatcaggtccgaggggaccgctcgtatgtgatcgtcaataaccctaaggacaacttgcggatggtcactgtggccgactacacattcatcgtgaaccgtaccagacaggtccgtgagagtcagcacttgaccaacggtggtaccttcagagataacgtggacgcactcattaacgttcgcggtggccagtacggacgtaagctcgaagtgaacattaacggcgtctgggtaagccaccagctccctccgggtgacaacgctaaggatgacccacctaaggtagacgcacaggctatcgctgaggctctagctgctctactcagagcggcacatcctacgtggacgttcaatgtgggaacagggttcattcactgtattgctcccgcagataccaccattgacatcttggagacaaaggatggctacgcggaccagcttattaacccagtgacccattatgtccagagcttctctaagttacctctgaacgcaccagatgggtacatggtgaagattgtcggggacacatccaagaccgccgaccagtattacgttaagtatgacaagagtcagaaggtctggaaggaaactgttggatggaacatctcgatagggctggattacaccactatgccttggacactggttcgcgcagccgatggtaactttgacctcgggtatcatgaatggaaggaccgacgcgctggtgatgacgataccaaccctcaaccatcctttgtgaactcaacgataaccgacgtgttcttcttcaggaaccgattagggttcatctctggggagaacattgtgatgtcccgtaccagtaaatacttcgagttctacccgccgtcagtggccaactacacggacgatgacccgctggatgttgctgtgagtcataaccgagtgtcggtcctcaagtatgctgtgagcttcgctgaggagcttctgctgtggtctgatgaggcacagttcgtcctgtcagccaacggggtgttatccgctaagacagcacagctggacctgaccacccagttcgacgtgtcagaccgtgcgcgtccttacggtatcggtaggaacatctactatgcgtctcctcgcagctcctttacgtccatcatgcgctactacgcggtgcaggatgtaagctctgtgaagaacgcagaggacatgacggctcacgtaccgaactacatcccgaacggtgtctatagcatcaacgggtctggtacggagaacttcgcgtgtgtactgaccaaaggtgcccctagtaaggtgttcatctacaagttcctctacatggatgagaacatccggcagcagtcatggtcgcactgggacttcggtgatggtgtggaggtgatggccgcaaactgcatcaactcgacgatgtacatactgatgcggaatgcctacaacgtgtggatagctgcggtggactttaagaagaactctacggactttccgttcgagccttacaggttccacgtggacgccaagcggtcatatcacatctcagagactgcgtatgatattgagacgaaccagacggtagtgaacatcaaggacatctacggtgcgtcgttctctaatggtaccgtggcaatctgcgagagtgacggtaaaatcaccgagtacgagcctacgggttcctcttgggattcaaccccggacatccacattagcggtgacatctccggtaaggacattgtcatcgggttcctgtatgacttccagtatgtgttcagtcggttcctcatcaagcaggagcagaacgatggcacaacgtccactgaggactctggtcgcctacagctgcgcagagcgtgggtgaactatcaggacactggtgcgttcactgtgagtgtcgagaatggcaaccgtgagttcaactatctggtcaacgccaaagtaggctctacgggtctacgtctgggccagaaggccacgactactggtcagtatcgtttcccggttacaggtaacgcactgtatcagaaggtttccttgagttccttcaacgcttccccggtgtcaatcattgggtgcggctgggagggtaactacatgagacgcgctaacggtatttaactgaacgtctccctgtggtgccactcaattaggtagcactatagggagaccacactaagagggggacttaaagcatgtacataagaaacactgtaagtaatgacttcgagttattcatcccggcctaccatgacgtacttgaggcgcaggccatgggtatagaaccatcgttcccagcggttactgagtgtgtcacgttagaccacgatggttttcctttggctataggtggacactgtggagaccagtgctggttcgtcacgagcgaccaagtgtggagactcgacagggctggtaagctggagttccgtgagagaatcatggagtacagggacatgttattaaatgtttatccatccctgtggaacttcgtgtgggtcggcaacggtccccacaagcggttccttaagtccatcggtgctgtattccacgaggagtacactcagggtgggaagttccaactgttcaccataacgaggaggtaactatgtgctggatggcagctattcctattgcaatgacagcagtacaagccatcggtcagtcgcgcagtgaagccaagatgatcggtcttcagaatgaccagatgcgccgacagtccgcccagatgattaaagagtcaaacattcagaacgctaacgccagccttgagcaaaagcagaagctggaagaggctagtgcagacttgaccgctaagaatctcgacaaggttcaggccatgggtacaatccgtgcggctatcggagagggaaaccttgagggtgccagcatggaccgtatcagtcgcatcgaagagggcaagttcattcgggaggccaacgcggtcaccgataactaccgtcgagactatgcgtcactgttcgcccagcagctgggtaactccgagtcaactattgaccaagttaagtccatgcagaaggctgagggcaaaggtaagtccaaactggaacaggtgctggacccgctggccttaatgggttcgcagggtgcctcagcgtatgcttccggtgcgttcgatagcaagggcaccaaggcaccaataagtaaggcccaaggtactaaggtaggaggtaagtaatggccagtaaattagaacaagcattaagccaactcccacaggccgggtctacccgaatccgtggcggctcagcgtccatgcagtatcgcccggtgaccatccaacaggaaggtgccagacagtccaacctagtgcagtccttggcgaagtttgggacagcagtaggagaagcagcggacgcatacgacaagcgccagcgagacaaggctgacgagcggtccgatgagattatccgtaagttgaccccagagcaacgtcgtgcggccatccagaatgggaccctgctgtatcaggatgacccgtacgctatggaggccctgcggttcaagactggccgtaacgctgcgttcctcatagacgacgaagtggcacagaaggttcagaacggtgagttccgcactcgtaccgagatggaagagtacagacacaagcggttgaccgaaggtgccaacgagtacgctgagcagttcatgattaaccctgaggactctgagttccagagagggttcaatgcgaacatcaccgagcgtaacatctcactgtatggtaagcacgatacattcctgagcgaacaggcacagaagggtgccatactggcctcgaaggtggagctgtcaggcgtgcttaaagaccctgccgttcttgcccgtccagagtccggtgagttcttccagcgctacatcgacaacgcgattaagaccgggagtatccctagcgacgctcaggcacaacaggtcatcatcgggtccctcaacgacgtcatccagcgtccgggtgcgaccaacttcttgcagagccttgagggccgtccggtcacccttaacgggaagaccacgacctacaaggaacttatgggagaggagcagtggaatgccctgatggtcaaggcccagtcaacccagttcgacaatgacgctaagttgtccgaaggtttccgccttgggatcaccagtgcgttgaaccaagacgacaccagcaagggctgggagatgcttcagggtgccaaggcagaactggatcgtctgcaacccggtgaacagatgacacccgagcgtgagcgcctgattcaagctgaggaacagatgcaggcccgtttccgtcaggaggcccaagcggtagccaaggagatggacaagcgtcaaaagaccattaacaagaatcaggtcatcgaccagcagttcaccaaacgcatcaacgggcagtatgtgtccaccagctacaaggacatgccgaccaacgagaacactggcgagttcactcacagtgacatggtgaattacgctaacgggaagctggctgagattgaccagatgcagctcacggagcaacagaaggaccgcatgaagctgagctacctacgggcagactcagagggtggagccttccgtaccgttgtaggccagatggtcaccgacgctgggtctgaatggtctgccgctgtgattaacggtaagttgccagaggacaccacggcgttgaacaagctgcgcaccatgcgtaacaccgacccggacctcttcgctgcactgtacccggataaggctgacttgtttctgacgatggacatgatggacaagcagggtattgacccgcagattcttatcgacgctgaccgttccagccgcagtctcaccaaggagatgcagtatgaggatgataaggcgtgggcgtccctgaagaacaactcagagtccccagaactgtcccgtatcccagcaagtctggatggtatggcccgtaagatttatgacagcttcaagtaccgcacaggtaacagtgatggtgccatgcagcaggtcgataagttcctcaaggaatccactgtgaccttcaaaggtgatgacatggacggtgataccattggtattatcccgaagaacatcctacaggtcagtgatgaccctaagagctgggagcaaggccgagacattctcgaagaagcccgtaagggaatcattgcggctaacccttgggtgacaaacaagcagctgacgatgtaccagcagggtgactctatctacatgatggacaccactgggactgttcgcatccgctatgataaggagctactgactcgaacctatcaggaacagcagcagcgactggccaaggaagctgaagagaaggcactgaaggaagcaaccaagcgtgcacctatctccgcagccactcaggcccgtaaggcagctggtgagcgcgtacgtgcgaaacgtaaagccactccgaagttcatttatggaggtggcgatgagtaaacaataaggagacaacatgagctacgacaagtccaaacctagtgactacgacggtatgttccagaaggcagcagacgcacacggtgttagttacgacctactgcgtaaactgtccttcaacgaatcatccttcaaccctaaggccgtctctaagactggccctaagggcatcatgcagttcaccaaagcgacggcccggagcatgggccttaacgtgaccgatggtgatgacgatgggcgctacaaccctgagttagccattgatgctggcgctaagctgcttgccagtctcgttaagaagtacgacggtgatgagctgaaagcggccctagcgtacaaccaaggggaaggcccagcgggtgcccctcagctccaagcgtacgacaagggagacttcaggtctatctcggaggaaggtcgtaactacatgcgcaagctgctggatgtggccaagagtccgaactcaggcgcactggaggcgttcggtggtatcaccccaaagggtaaagggattcccgcagaggatgccttcaagggcatagctaagactggtaaggtaggtactgagctgccggagtcccatgggttcgacgttgaaggtgtagcgcaggaagcgcccaacacgccatacgctaaggacttctgggagaagaccgggacgactctcgacgagtataacgctcggtcaaccttcttcgggttcggtgacgctgctgaggctcaacttcagaactcaaccttgggtgtggccttccgtgctgcgcgtgctgatgatgggtacgatgtgttcaaggacacgatgaccccgactcgctggaactcttacgtcccgtccaaggaggacttacagaagctgcgggactccgggttacctccgagttactacggtgtggtgactggtggtgacggtgagaactgggatgcgctcatcaagctggccaaggataactttgaggctgaccaacgggccgctgaggctggtactggggcgaaactcgctgctggtatcgttggtgctggtgtagacccgctcagctatgtccctctggtcggtgtggccgggaagggactcaaggtggtcaataaggccctgcgagtaggtgcacaggctggagcactcagtgttgcctctgagggaatccgtacgtcagtagctggtggtgaagctcactacgctgatgcagcacttggtgggttactgttcggtgctggtatgtcggctctcagtgatgctgtggcggctggtatccgtaaggctcgtggagtcgagtctgtgaatgagttcgctggtccggcactccgtatggaagcacgagagacagccatcaacactggtggtcacgatacctctacactacctccagataacttctcgttcgagcagggccacggaggcgttccatttgctgaccacccaaccgaagagggcgcagtggttcttgccaatggttccatcttgagcgacaccaacccgcttaacccaaggacccagcgtgacttcgcagagattgacccagagcgtgcagctcccggtatcaaactcggtggattcactgagattggcctgaagaccttagggtccaaggacgctggtgttcgtgcaatcgctcaggacctagtgcgctcacctacagggatgcaatcagggtctagtggtaagttcggtgcgaccgcttcggacatccatgagcggctccatgcgactgaccagcggatgtataaccagctgtatgacgctgttgaccgtgccatgaaggacccagagttctccattggtgagcagaagatgtcacgcagagccatccgtcaggaagtctacaagcgtgctgccttggcgattgagcgtccagagttacaggctgatttgaccaaaggtgaacgtgaggtgatggacctactgaaagagcacttcgataccaagcgtgagctgatggaacagccgggtattttcggtaacgctaacgccgtgagcatcttccccggtagtcgccataagggaacctacatacctaacgtgtacgataggggtgctaaggagctgatgactcagaaactaggcggacctgaaggactccaacaggcaatcgctcagagctggcttaccagttaccgagtgcgacctgaggttaaggcccgtgtggatgagtacctcatggaactcaacggttacaagtcggttgaccaagtgacacctgaggtagtccagaagcacgctatggataaggcgtacggtatcagccacactgaggacttcacggcatcaagtgtcattgacgacaacatcactggtctggtcggtattgagaacaactcgttccttgaagcccgtaacatgttcgacagcgacatcccggttaccttaccggacgggtcaaccttcagtgtcaacgacctgagggacttcgacatggcacggattatccccgcatacgaccgccgagttaacggtgatatctccatcatgggtggtagtgggaagaccactaagcagctcaaggacgaaatcatggcgttagacaagcgggccgagcgtaagggacaactgaagggtgaagtggaagccctgaaggacaccgttaagattctcactggtcgtgctcgccgtaacaacgatacggcctttgagaccgccatgcgttctctgaatgacctagcgttcttcgctaagaacttctacatgggtccgcagaacctcacagagattgcggggatgttggctaagggtaacgttaaggcgatgctgcatggtatcccaacgttgcgtgacctcgccaccagaacctctccggtttccggtagtgaactccgcgaactccatggggcgctgttcggtaaggaactcgaccagttaatacgtccgggacgtgaggacatcgtacagagaatccgcgaggcttccgataccagtggggccatggcgtcagtcattggtaccatcaagttcggtactcaggagctgtcggctcgttctccttggaccaagatgctgaacggtacggctaactacattctggacactgcccgtcagggtgtgctcggtgatgtggctggtgcggccctaggcggtaagggttccaagtttggcaaagagaacttcctcaaagctgcctctatcagtccagagcagtggaagggcatcaagcaactctttgttgaccatgcgactcgtgataccaacggccagttcaccatcaaggacaagaaggcgttcagtcaagacccgagagcgatggacctgtggcgtcttgccgataaggttgctgatgagaccatgctgagacctcacaaggtatcccagcaggattccaaggcgtatggtgctggtgtcaagatggctatgcagttcaagaacttcaccatcaagtcactcaacgctaagttcattcggtccttctacgagggctacaagaacaaccgtgccatcgacatggccctgacccacgtgttgtctatgggtatcgctgggacttactttgcgatgcaggcccatgtgaaggcttacggactccaagaggctcaacgtaaggactacctgaagaaagctcttaacccgactatgctgggctacgcagcgttgactcgaagttcccacactggtgccccgctgtctatcgtttcgatgatggctggtgccgctggattccaagacgccaacatgctgcgctccaccatcttacctaaggaggaacagttccagaagaaagatggagcgtccaaaggtcgagccgagtcgagcaaccttgcgggtaacttggggtctcaggtcccagcgctgggttacgtagggaacgtcattgcgaccgctaagaacgcttatggtgttgctacagcgcctaacaagccgactgagcgtgactacatgactggcctgatgaactccaccaaggagcttgtacctaacgacccgctcacccagcagctcataatgaaaatctatgaggcaaacggtgtgaccatcaagcaacagcctaaacctaactaattaggtagcactatagggagaccgcttggtttcccttctcattcactttaaggaggtcataatggaccaagacattaaaacagtcattcagtacccagtgggagagactgagtacgacatcccgttcgactacctatcccgtcgcttcgtcagagtgtctctggtctctgaggattcccgaagactgctgagtaacatcacggagtaccgctacgtctccaagaccagaatcaaactactggtttctactgaaggtttcgaccgtgttgagattcgtcggtttacctcagcctctgagcgaattgttgacttcaatgatggctctgtgctgcgagcaacagaccttaacgtatcacagctacagtcggcgcatattgcggaagaagcccgtgatgcagccctgctggccatgcctcaggacgacgcaggtaacctcgatgcacgcagtcgccgtatcgttaacttagctcccggtattgacggcactgacgctatcaataaggaccagttagattcaacgctgggtgaggctggtggtatcctttctgatatgaaagaagtacagaaggaaacctatgactatatcgagaagctcggtgatgacacttcaattgtccgtggggtaacttgggtgtacaaccaagggtctgccgttggtggcgagactactgtactcatcgataaacctacccgcacgctggccgttccttatattgagattaatggtagccgccaagaggttgggtatcacttctcgtttgatattgccacccagatgattaccttaacggaaccactggttaccggggacttcctgatggcaatgaccacagagtctagtgtacctctggaagaccttctggctaacccgactggtgcctcggctatcggtacctccgatggtcgaaacgttcaggcaaacatcgacgagcttcgctcagagttagacttcctgaaagacactacggtgctcgacgttcgccgttttggtgctgtaggtgatggtattgtagatgattacccggcgtttcagaaagcgtgtatcgctgcgagccaacttggcggggcaatagtccacgtaccgaccccaaaggtaaaatggaagattggattcccggtatacttgttcgaccgaacttgggtccggggtacaggcattaactgtattgtagagttcactgacccgctgtatgcacgcaagtcccgctctgggttcgtcattgggtctggttatgaacagaaccgagacaaggccattcagtgtcttaacgatggcacttgggccactactggctcggtggtaaataaggacttcgttgaattgggccgagggcagtacgtacgcgacaaccctagcaaggtccagtcaagactgtgccgagtgtccgggatgtacctgaaagcttcgtatccgaacggtgctaccctgaagggcggctacgctgtgtctggtgccaacgcggtagactcagaggtatttgacatttggggtgaaggttggactgagattatcaacttcgggtctgacgtaccgccagctacgccaagttgtcacaacctccatgcgtacgacatcacgtgtgttgctcctaacgactacgagacgtactacagcgcagggttcattgcgaactctacaaactgctctattggccgattcaagcagctcagggcaatagctgatggttctcctcacggttcctgtggttccatgaactacaccgagtattgctccttctacgatatcgacgtaccgagcttaggtcgtacagcctcgtctgagggtatccttgtgaacaactccaagggcgctgtgactcgtaacgttcgtattggtaacgctaagaccggggtggccgagtattacaccactggtgctggtatcttctacgacagagaccaacccaacgtgttcgatagtatccatgcgaataactgtgacaacgcggtagctctccgctccaagttctcggtttggaagaacgtgacgcagaccaactgtacctaccacgtctacttcgggaccaccaacgctcaagcctgtgtggttaagttcgtaccggacacaattggtggtggtaataacgtagacattctggacaggctccgcgataacgttgtgactggctggcgtgtgcgctcgctccacatccgccctatcgcctacctactgaacgacaagtcagtattgcgtagctgggatgctggtaagaacatcaaggctgagaacggtgtgggattccagtggttattccctgtaccatctaccatgcgtgcaatcactcaggtcagccaatggtttaccttcgaggtgggtgcagcgacggcagggacagaggtcaaggttcaggttcgccgtatgtcagcgtacaacggagacgccaacgagcagcctgtaatcctctttgagaacagccgaaaggcctctctggataccgtacaggctactaacattgtggccaactccccgggtctggtcctgacgtcccctacggatggactggctaacgctgtggatgtcctcgtgagtgttacggcaccgaccgttaacttcaacatgaaagaagctcgcatcacgtatctgggcgactaactaaggagacagtatgttaaacaaattgaatcaacctaaaggctctacaatcggtgtgctcaaggatgggcgcaccgtccaagaggcaatcgacgagctggagaagattaatacccgaaacgttgaccctgagcgcttccgtgagacactgacgtcaagtgatgatgaggtgttcgagaagatgttcgcgtggttggccactcagtcagacgttgtgggaacctcaagttcttcctatatcacagccttacctcgcatgattgagcttagcggtcgtacctatacgttgactaagcgtcacgtgctggacggtaactttggtatacagaacggtaccatcctgatgtccggtgagggtgagattatcatgggcctcgatgctggtaccaagactcgtcgtcacttccttaagtatgtacatttcgagtacatcggggcatccgaccgtagcacctctctggtcaccatggcgcgctgcttcaactctgtggtgctattctgcaacttcatcgctggtggtgataccgctcgcaacagagaaccgcgtacccgttatggcctgttcgcagggtccacccgatgctggggcttccagttaatcggtggtgagtactacggtggcgactgtgcgttacgtgttggacgagctaacgaccacactgggttgacaattcgtcccggtactgttcaccattcgcgtgtaatcaacatgatgttgtgtaacccagcaggtgccgaggtgtctggctgtaacattgaacacgcagacaatggggccataggcctagggattacctcgggtaccaatacctccggtaacgcagcccatggagttcgcatcaacggtgtatacttctacaacaacggtaacggctccagcggctcaaacgtagcaccagcgaatatcctcattggtaaggacattccgggtacagaaggttgggaccgaccgggcgagcttattacgtcaagtagaaacactgcgcacagcattacggtgtcagagtgctacatcgttagcccaaacacccagaacgcttggcaggttaacgccctgtatggtgtatccttcttggacaacaaagtgggcctcaaaggtgacgctacgattcacggtgtgtatgacggtacatgtgctaactgctgggcggtcggtaaccgagaccaaggtggcaaggtgttccagttctcctctacggcaaccaacgcgattctgactaccagaaagggtaagtggactccgaagattatcggcgagggcacagcaggtaacacgacgctgagtgcttctggtggtgcgtactctctggataacggaatggtcaccgtatcgtgcttcgcagtggttgacactaaggacccaaacatgactggcaacctgaacatcaaactcccggtagcctgtgaggaccagcagcggggcggtacaggcatctcgttgacgaacgttccagacgtaccgagcccgaatggtagcatcattgtgataggagacaccgctcgaatcatgctggggtctgcgagactacagccatcaaacgtcacgaccggtaccgccatccacttctcagtatcctacccagcagacgttaaggtataaggaggtaacatgttgtccctagacttcaataacgaagttatcaaggcggctcccattgcgggggtcgctggggccgatggtgtagcgaggctcttttggggcctatcactcaacgagtggttctacgtcgcggcaatcgcctacacagtggttcagattggtgccaaggtagtcgataaaatcattgattggaagaaagctaataaggagtaacatatggacctgattaagttcctcgaagtgttagacactgagatggctcagcagatgctcatggacctgaagaatcctgagaagcgaacccctcagctgtacaatgccattggtaaactactggagcgccataagttccaaatctctaagctgacccctgacgttaacatcttgggcggactggcagagggtctggaggcttataactccaaggtgggtgctgatggtctgacagacgacgataagttcaccctacagtgatatactcaaggtactactatatgtagtgcctttatggatgtcattgcgctacgctaggcgttcctacgtgaaatctgagaaacaacgggaggcattatgctggagttcacaaagagaatcgtcccgtatcttgtggctatcatggtgtttgccttcgggtggcacttgggttcgcaatctacggacgctaaatggaaggaggtagtacagaatgagtacgtttcgaagcaaacagctagagttaaaactcaagcagcacttgatgagatatcggctaagtaccaagcagaccttgaggggctggagggcagcactgataggattattgctgatttgcgtagcgacaataagcggctgcgcgtcaaagtcaaacctaccagtgtccccacaggaccagacggtcgatgcctcgttgatggttccatcgaactacacgaagcaactgctcgaagtcttatcgcaataacccagaaggctgacctcaaagagaaggccctacaggacacaattcgcaaacttcagggaaaggaggtgaacattgagtaactctcagcaagccaagaacgccttaataattgcacaactgaagggtgactttgtcgcctttctcttcgtgctctggaaggccctgaacctgccggaaccaaccaagtgccaaatcgacatggccaagtgtctggcaaacccaaagaacaagaagtttatccttcaggctttccgtggtatcgggaagtcgttcatcacgtgtgcgttcgtagtgtggaccctgtggcgtgaccctcagttaaagatactgattgtctcagcctcaaaggaacgtgcggacgctaactccatcttcatcaagaacatcatcgacttgttgcctttcctgagtgagcttaagcctcgccccggtcagcgtgactccgtgattagctttgatgtaggccctgccaagccggaccacagcccgtcagttaagtctgtgggtattacgggtcagcttactggtagccgtgctgatatcatcatcgcggatgacgtggagattcccggtaactctgcaacccaaggtgcccgtgagaaactctggacattggttcaggagttcgccgcactgttgaaacctctaccgactagccgtgttatctatctgggtacccctcagaccgagatgacgctctacaaggaacttgaggacaaccgtgggtactccaccatcatctggcctgcacagtatcctcgctccaaagaggaagacctgtactatggcgaccgactggctcctatgctccgtagcgagtacgatgaggacaaagagggcctcagtagtcaacctactgacccggtgcgattcgactctatggaccttcaggaacgtgaggtggaatacggcaaggctggctatacgctccagttcatgctcaacccgaacctcagtgacgccgagaagtaccctctacgcctccgtgacgctatcgtgtgcggtctacagatggacaaggccccaatgcactaccaatggttgccgaaccgtcagaatcgcaatgaggagcttcctaacgtgggtatgaagggtgacgagatttactccttccatacagcctccagcaacactggtacgtatcagggtaagattctggtcattgaccccagtggtcgcggtaaggatgagactggctggtgcgtactgtacaccctcaacggttacatctacctgatggacgctggcggtactcgtggttatgaagagaagtcccttgagttcctcgccaagaaagccaaacagtggcaggtgcagacagcggtcttcgagagtaacttcggtgacggtatgttcggtaatgtgttccagcctgtgctcctgaagcatcacccagcgcaactcgaagagattcgtgctcgtggtatgaaagaggcccgcatctgcgatacccttgagcctgtactagcaagccaccgcttggtaatccgtgacgaggtcatccgacaggactaccagacagcacgtgatgcagacggtaagcacgctctgaagtacagcctgttctaccagatgacccgtatgagccgtgagaagggagctgtggcacatgacgaccgacttgatgcgttagcattgggtgtcgagttcctacgctccacgatgcagcaggacgctgtgaagatagaggctgaggtacttcaggagttcttggagcaccacatggagaagcccctgagtaacatctcccagttccgggccaccagtagcaacggtgtggacatccgatgggaagacgacggggatgactctatgttcatcgaatggtaaggaggtaatatgtttgacgtgaggtatgacccggatgtgccggggtgcctctctaactctaaaggtgagcaactcgcagttctacaaggagaatacttcaagtggaacggcgggagtgctcatcgtattgtatgggaaggcttcaatggtaggatacccgatggttacatgattgaccatataaaccgcaacaagcaggacaatcggatagagaacctatggatggttactcggtcccagaatgtccacaactccaagcgtgcgagggctgatggtatgcctaagggaattacagaacgccagcgggactttaggattctggtccacaaggattgcaagaggtacgtaaggtatgcgccaacacttgaggaggccataaaggtccgagaggagcttgtagagtccttaggcctgtctgcatattatgtcgattcagacgcataaggattcattaggccacggaaggccacttttggaaaactctaagtataacagacacttggaattaggtagcactatagggagagacccaaggttacatactataagactacttaaagtttcattcatatagatatgcactttaagtctccttaaaggcagagggtagtgatgataatatcaccctctcactataagacactaagagctaacacaaggaggacctatgcgcttattgttaaccttactgcgccataggactacttggcgatttctgctggtacttgctggtgcccttggggcttcactggttactcagcagcaactcagtggactggagactatcatgtgctctctactcacttgtagcgattagggtcttcctgacgcgctagggattccgtagtgatgcttatcagcatacaccactccatccctctatagtcaatacttaaagttaaccttaggtgattcactgggtctacctacgggtctatgcaatgacctgaggaatacctgaggttacctttaagaatatgacataaagttctgagtgtatatctcacagtttacacttttggttatccccccggtaccctctcagttcacccaaagtaaccataggccaccctaaaccttcggtttaaccttaggtgggactgatgggaaaccttgggtgatactatatgttgtggtgagtgggaccttgggatactatatgttgatgcctctgtgtccc

SEQ ID NO: 14 - DNA, 40352 bp, Unknown
  source: /note="Description of Unknown: KP3W-P0114 Bacteriophage sequence"
tatctgttggtagtctctaagtcacacctgaggtaaccacctgaggtaaccaccttgggtaccacctgaggttggacctgagaccacataccttaggttgaccaatggtacattaggttaagactcttagatagtggtgagccggtactaacacaattaggtagcactatagggatactctaagacactaagagaccattaccattaagaacactatcactataggtcttacttaaagttcacttagcgtattgacattaggtctacactgtgagacattagcaaccgttgagagacacgacgttatcaaccactggcatacttcgagttaccagatggatactgaagggtctcaagtagtcatcaaccagacatacgaaagtggttgactcaacggttaacaagtagtaacatgcttcacagtaacacgcagtaccagttaggcgacttggaaagttacacggttgagcagatacgccggagtagtacagcaagtcaacctacatgctctttaacaatatggattagctcttacatgatggccactaacttagtgattaactaatggctgcttagggtctctggcacgatatgctctgccatctctaagtagccatgcatgataatcattaacgcagacaataggaaatacatcatgatttacactaaagagccagctaacaaagtattcgtgttcgttaccgcttaccgtggttatgagtcacaagaggtaaacgagaaggtgcttaaaggtctcattaagaccatccgtacttatccgggtgcatacggtaacatccgcgatgagcacgtacagggatgctttaaggaagctggtatgactgaggcaacgcaagagcgtacgcttaaggtcgaatgcactgagaagcaagcagcagagttaacttggttagcgtgtcgtgtatacaatcaggacgctgtactcgtggtacactcgcagactcacacagcgcacttatggtctatcaccacggtgggagagtacccgcaagctttcccgatgctcaaagaggatgcattaggtggcacgctgcaacctgtggatgcgcctaagggcgaatgctactcggtaatcaacgggcaatgctgggaggtggtgtaatgattaaatacggtctcactcaggagcacttaaagttataccgcacagctatggcatacggtgcatcattcggttactgtatggctcaactggcccagacctaccgctcacgtaaggtaatgtatggcactcctactgttcgtacttagcgtgtacaccttgattgtcctgtactttgtgcgggactttcgcaagggtctcaaggtacacaaagcatctttcagttacctgaagtggggcttcttgcctcgcttcactgtaagactacctaatggccgctttaaggctaacaaggtaggcatcttctatatcgcaacccactaacaccgcacttaaggaaacaacctaatgaactacaccgatatccaagctcgtcttgaagccatccgcaacgttgcaatctgtgaactcgacaagcgccagccaatgctggtcgaactcatcgcggacattgtgaactgcgaaacgtgtgacgggaacgacactgacagtgactatggtctggaacatcaagactactggcaaacgctgaagattaaggccaaagacgccgggtttaacctgctgggaaatggtcacttcagcgcagcgtttaagcatgagctaatgccgggcaaggtcattaaggttggctttaagaaagaagactcaggggccgcctatgtggctttctgccggatgcatcaaggccgggtagggatacctaatgtctatcacgtagcgcgtcacgctgggtgctacacggtggtacttgatgagttgttaccatgcaagcgccgcgaggatgacaaccacgaccactacgcagacttagcgtatgactttgtcgaatgcggctatgcacctgaggagcaccaccagaaggacctagcgtttatcgagacgtgccatatgattcgggacttcttctacgggattgcatctttcgatatgcatagcggtaacattatgttcgataagcagggcaaaccgtatattaccgaccctgtgtccttctcacacgaccgtaagcgtgaggcattctcgctggagcctgaggagttactagcagagattgagcagatagctaccgccaagatgattgaacgctgtaagcgcaacaaggcaaagcgtgacccgaacggggagctgcgcatcgcacgccggaaggccaataaggaacgtagagcacgccgtacggcgcacgctcggtggcgtgaggagcgcgaacgggcgcacgctcggtggcgtgaggagcgcgaacggattaacgctgaggccctaaagtttgaccttgcgaaagtcgaggagcgagtgcacgcatggatggcctgcgacggtctcgccatacagcagggtcggggacttccggtggacaactaccttcagggtagacttatgggttgacaaggtgtatcttaggtgtctccgaacggtgaggcaccaatagataaactttattcacaaagaggcacacaatgaacgcattaaacattgcacgtaatgacttctcagagattgaactagccgctatcccgtacaatatcctcagcgagcactacggggacaagttggcacgcgagcagttagcactggagcacgaagcgtacgagctgggcgagcagcgtttcctgaagatgttagaacgtcaggtgaaagctggtgagttcgctgacaacgtggccgctaaaccgctggtcttaacgttgcaccctcagttgaccaagcgtattgacgactggaaggaggagcaagcaaacgctcgcggtaagaagcctcgcgcatactacccgattaagcacggtgtggcctcggagttagccgtcagcatgggcgctgaggtgctcaatgagaagcgcggagtgtccagcgaggctatcgcactgctgaccattaaggtcgtcttagggacgctcacagacgcctccaaggctaccatccagcaggtgtcctcgcagttaggcaaggcgctcgaagacgaggcacgcttcggtcgtatccgtgagcaggaagccgcctacttcaagaagaatgtagcggagcagctcgacaagcgcgtgggccacgtgtacaagaaagccttcatgcaagtggtcgaggccgacatgatttccaaagggatgctaggcggagacaactggtctagctggaagactgacgagcagatgcacgtgggtatcaagctgctggagctcctaattgagggcactggtctggtcgagatgaccaagaacaagatggccgatggctcggacgatgttaccagtatgcaaatggtacaactggctcctgcctttgtggaactcctgagcaaacgcgcaggggcgctcgcgggtatcagcccaatgcaccaaccttgcgtagtccctccgaaaccttgggtcgaaaccgtaggtggtggctactggtcagtcggtcgccgccctctggcacttgtacgtacccactccaagaaggcgctgcgtcgttacgatgacgttcacatgcctgaggtatacaaagcggttaaccttgcgcaaaacacgccgtggaaggttaacaagaaggtgctggcggtggtcaacgaaattgtcaactggaagcattgcccggtgagtgacgtcccagcgattgaacgcgaagagttaccaccacgcccggacgatatcgacaccaacgaagtgtcacgtaaggcatggcgcaaggaagccgcagcggtctaccgtaaggacaaggcacgccagtctcgccgcttgtcaatggaattcatggtcgcgcaagccaacaagtttgctaaccacaaggccatttggttcccgtacaatatggactggcgcggacgtgtgtacgctgtgagcatgttcaaccctcagggcaacgacatgaccaagggtatgctgacgctggccaagggtaagccaatcggtctcgatgggttctactggctgaagattcacggtgcaaactgtgctggtgtcgataaagtcccattcccggagcgcatcaagttcatcgaagagaatgagggaaacattctagcgagtgccgccgacccattgaacaacacttggtgggccacgcaagattcaccattctgcttcttagcgttctgctttgagtatgctggcgttaagcatcacggcctgaactacaactgttcactgccgctggcgttcgacgggtcttgctctgggattcaacacttcagcgcgatgctccgtgactccatcggtggacgcgctgtcaacctactgccgtcaactgaagtgcaggatatctacaaaattgtggccgacaaggttaacgaggtgctccaccagcacgctgtcaacgggtctcagacggtggtcgagcagattgctgacaagaagaccggggagattcgcgagaaggtcacactgggtgactccgtaatggctactcagtggttgcaatacggtgtgacacgcaaggtcactaagcgttctgtcatgacgttggcctacggctccaaagagtttggcttccgtcagcaagttctagaagataccgtgcagccagctattgacaacggtgagggcatgatgtttacccaccctaaccaagcggctggctacatggctaagctgatttgggacgctgtaactgtgacagtggtggccgctgtggaagcgatgaactggctgaagtctgccgccaagctgttagcagccgaggtgaaggataagaagaccaaggatgtgcttcgtaagcgctgtgcaattcactgggttactcctgatgggttcccggtgtggcaagagtaccacaagcgtgaccagtcccgcctgaagctgacattcctcgggcaagccaacgtctttatgacgtacaacaagggcgactctaaggaaatcgacgcgcacaagcaagagtctggcatcgcgcctaacttcgtgcactcacaggatgggagccacctacgcatgacagttgtccatgccaatgaggcctacgggattgactcattcgcgctcattcatgattcgtttggtaccattccggcagacgctggcaacctgttcaaagcggtacgcgagaccatggtcaagacttacgaggataacgatgtaatcgctgacttctatgaccagttcgcagaccaattgcacgagtctcaactcgataaaatgcctgaggtaccagctaaaggtgacctgaatctgcgcgatatcttagagtctgacttcgcgtttgcataaggtatccagcaattaggtagcactatagggaaccttcgaatgacagagggttccattacttaaagtttaacttaaagaatacttaaagaggcacgccatgacttactcaatcgttgtaactatcttgttaatcgttgtgctcactttgttccttgtgagtatgtccaaaggcacatcactacaggagcaacaccagaagcgaatcgccaagttcaagagtgacaatgaggcaagggtggcacgtatcgtgcatcttactggagaagcagcacgccaccgtatgcaaaacgagacgctaagagatgaactggcgaaggagcgacagaaggttctaatgggaagggagcgcgttcaggttcaacgcgaccgtatcaactttctccgcgataagaacaacaagctatctgatgagttgctcatggtctccgacctgattcacgttaagttcaccgcactgctgccagacggtcagccagtgaagaccgtgtttaagctgggcttagggccttgcgggttacacgttaagtcactccgctggactgagcttgacgaccgctatttgatagaccaactgtgcaccaacggtgagcgtaaacagttcatgtattacaagaacgaagtagtagggcgaatcgagttccgccacggtaaggcgtgattaggtagcactataggaacatactcaaggtcatcctcagggtggccttcatgaatgtacctaacacccacacaggagcaacgacatgtaccagaacacaatcaacttcgagcgtaaccgtgaacgtcagcagaccgagggttacatacctaagggtcgcaagctgaacaagacgcagcgaggcggtggcgtcaaaggttctttccgtaacgctaaaggtgacagcgttgtcaaccaagagaaatacttcgtaggagcgtaacaaatggctgagcaaactaagtacctatttgacggcagcacggcccaatggtctcgcctaggtcataccgagcgaagactgcttgacgagacgggactccacgtcatcatggcgtacctctcgtggaaccatacagtctctctctcagtatacgagccgcacccagatggtgacgtgctgttagttgagaagtccttcagtcgctggtcgattgactcagcgtcagactggctggcaaaactcaccaacgattatgcaagctggaaatgattaggtagcactataggcagactcaaggtcatcgacattcggtggcctttatgattgcttattgcacactaaatgaacactacacttcggagacatcatcatgatgaacattaagactaatccatttaaggctgtatcgtacgtacgctctgctatcgagaaggcactggagacttccggttacctcatcgcagatactaagcacgatggtgtacgtgggaacatttgcgtagacaacacagccaacgctgcgtggctcagccgggtctctaagaccattccggcccttgagcacctcaacggttttgaccagcgctggcagaagttactgaaagatgaccgctggattttcccggatggcttcatgcttgatggtgaactcatggtcaaaggcgtggacttcaacaccgggtctggcctactgcgcactgtctggctcaagcagagcaactttgcgttctctacctgcgaatactggcacgatgagtggaagaagaaagccaatcgtcaaccattccacctcgacccttacaatctcaaagttgtcctctacgatatcattccgattgacattatcgaatctggtgacgactacagcgtgatgaccctcctccgccttgagcacgtcaaggtagccttaccaatcctgcaagaccacttccctgaagtcgagtggtgcctctcagagtcccatgaagtttacgacatggacgaactcgatgcgctgtatcgacagaaacgagaagaaggtcacgaaggtctggtggttaaagacccgcaaggcatctataagcgtggtaagaagtcaggctggtggaaactgaagccagagaatgaggctgacggtgtcgttgttggtctcgtttgggggaccaaaggcaaggccaacgagggtaaggttatcggctttgaggtgctccttgagagtggtcgcgtggttaacgctacgaacatctcacaggcacttatggaggagtttaccgagaacgttaagcgtacctcattggactccactggattctttctgccgtacggattaggcgagaacggtccacacttcgttaacccctatgacggatggcagtgtcaaatcgcctacatggaggaaactccagacgggtctttacgtcacccatcgttcgacaaatggcgtggcaccgaggctgaccctaccgttaagatgtaattaggtagcactacaaggagacaacaatatgtctatcaatctggttttaatcatcgtgttcatcctcgcggctatcgtgtggtcaatgaacgacgagccacctaaaggagcataaccatgcgcttacactacaataaatccaacggtatcttctcggttcgccgggaggaccgcagcactgtggcagcctctgagcgtcacggcaagattccattcatcggcgataccttcgagctggcacccagcgtgcacatcttggttactcgcggtctctacgaattggctcaaactaagagccgtcctttcgtacccgtggtggtaaccaagtggccacgccttcgcctgttctgggagcgcttcaaggaggtgttcgatgacggccaagagtaacttagcagttaacggtcacgagatttactgcgcatccctgcacgggccttctcactgtaactgctcgctacgcgggcggatggaatccatcgtaaaggatgacggtgttaagcagccgagccattaccaactgttcgaaggcgtcgaggccatcgaggtgattgctcgcagcatgacccaagagatgttcaaagggtactgcctcgggaacatcctcaagtaccgccttcgtgctggtaagaagtccgagctggctaccttagagaaagacatggcgaaggccactttctatctggagctgtacaccaagcacaagggtctgtgttatgacgccgagtgagtggtgccgagagatgtacgagaagacgctcgaccctgcgtacatcaccctgtataacatgtggaaggagcgtgaagatgcaaaagttcgtcgtaacagtcgagacagctaacgcatcgtatgaactcccggtgcacgctgggtctcttgaggaggccctcgaagttgccgaggcggagtacgaagagttaggccaagtgactcgggttcgcccagagagtcattaggtagcactatagggacacaggttgtcccacttactgtttaaacttaaaggagattcatcatggcattcgctaagaagaagatttacaccactaagattggtacctgtgagccgtatgcttacttcaacaagcctgactttggcggtgagggttttgagaacccacgcggtacctacaagggttccgtaacgttcaagaacgaagactgtcaggagctggtagacctcatcgttaagacccatgaggaaaactacgctgcacgtctggaagcgcacgaagcgaacccgccgaaggttcagaagggcaagaaaccactgaagccatatgaaggcgacatgccgttcttcgacaacggcgatggcaccaccacgttcaacttcaagtgctacggttcttacgaggacaagaagactggtgagaccaagaagattgttctgggcgtagtagacgcgaagggcaagcgcattcaggacgttccgattatcggtggcggctccaaagtgaagattcgcttctcgctggtgccatacggctggtccgctgtagctggtgcctccgttaagttgcagctggaaggcgtgatgctggtcgaactggctacctttggtggtggcgaagatgactgggctgacgaagccgtagaaggcggttacgaagcggaagaacctcgcagccgcaaacctcaggaagacccggaagactggtctggtgaggaagcggatgagggcgaagccgaagaagacgatgacttctaatggctggctatggggccaaagggattcggaaggtgggtgccttccggtctggccttgaggacaaggtgtccaagcagttagaatcaaagggcgtcacgttcgattatgaattgtggcgcatcccttacgttattcctgcgagtgaccacctttacactccagacttcttgttacctaacggcatcttcgtggagactaagggtctctgggaggccgaggaccgcaagaagcacctattgattcgtgagcagcacccggagttagacatccggttagtgttctcttcgagtcgcaccaagatttacaaagggtcaccaaccagttacgctgagtggtgcgaaaagcacaacatcttgtttgccgacaaattgattcccgtagactggctgaaggagccgaagcgcgatgtaccgttcggcaagttcaaacagaagaaaggagcaaagtagttatggcaaaggttcaattcactaagcggcaggagacctctcagattttcgttcactgttcagccaccaaggcaaccatggacattggtgtccgtgagattcgccagtggcacaaagagcagggatggctggacgtaggttatcacttcatcatccgccgtgacggtaccatcgaggctggtcgagaccaagatgctgtaggttcacacgccaaggggtacaacgcgacttctgtcggtgtgtgtctggtgggaggtatcgacgccaagggcaaccacgaggcaaacttcacgccagcccagatgcaatcgctgcgttcactgctggtagaactgaaggtgcagtacgctggggctgtgctcatggcacaccacgatgtagcacctaaggcgtgcccgagcttcaacctgaagcgctggtgggacaagaacgaactggtcacttctgaccgtgggtaaacattaggtagcactacagggagacaattacgtttccctgttgtcgcacattctgtacaaattatggtcaggctaaggtgcacttggcgtagcgctgcgtttcattcgggttcgattcccggactgaccacaccaacggagattactttatgaacaagtttagaagcttcgacccgataccgttcctagcgcacggactgttcgcactctggggactgtcgttcctcttatcggtcatcaaagcgtgtttcaacggtacggctttatgagttacggagactctcaagaagacggtcaggagagcatcttcctgttccacgctccgtgcgaaaactgtggttcttctgatggtaactcagtgtactctgacgggcacgagtggtgttttgtgtgtcagcaccgagttaaaggctcagaggaacgtaccgaaaagttatcatcgagaagacccaaaggagggaattacgggatgaatacacaaggtgcaggtttactggtgttcggtgagaatgacggtcggtacactgacctgacggctcgcggcatctcgaaggcaacgtgccagaaggctggctattggattgccaaggtcagaggggttacctatcaggtagccgactatcgtgaccagaatggctccatcgtatcccagaagctacgggacaaggagaagaacttctctaccagagggtcccacaaaggggatgcactgtttggtaagcacctatggaatggcggtaagaagattgtcatcaccgagggtgaaatcgacatgctaaccgtgatgcagctacaggactgcaagtggcctgtggtgtctatcggtcacggtgcgtcagccgctaagaagacttgtagtgccaactatgaatacttagacagcttcgaccagattatccttatgttcgacatggatgaccccggccgtgcagccattgaggaagcagcgcaggttctacctcccggtaaggtacacgtagcggtactgactgagaaggatgccaacgagtgcttacttaaaggtaaaggcaaggaggttctcgaccagatatggaacgctgccccttgggtgcctgatggtgtcatcggtgctatgtccatgaaggaccgagtccgtgaagctatgaccagtgagcagagtgtaggctacttgttctcaggctgtccgggccttaacgatagaacgttaggggcacgtggtggcgaggttataatggttacctcaggctcaggcatgggtaagtcaacgttcgtccgtcagcaagctctagggttcgccagagggcagggactgaaggtcggcatggcgatgcttgaggagtccgtagaggagaccatggaggatgtcttagggattgccaacggtatccgcttacggcagcaacctagggagttcaagcagaaactcattgaggatggtacgtacgataagtggttcgatgagctgtacggctccgaccagttccacctctacgactcgttcgctgaggctgaagtagaccgactgttagcgaagctccactacatgcgcacagggttaaactgtgacgttatcattctggaccacatctcaatcgtagtgtctgcctcggaggaatccgatgagcgcaagatgattgaccgactcatgaccaagctgaaagggttcgctaagtcaaccggagtggtactcattgttatttgccacctgaagaacccggagaaaggtaaagcccatgaagaaggacgtgctgtttccattactgacctgcgtgggagtgggagcctccgccagctctctgatactatcattgccttggagcgaaaccagcaaggtgatatgcctaatcttgtcctcctccgtattctcaagtgtcgctttaatggtattggtgtcggcattgcggggtacatggagtacaacgaaaagacaggactcctcgaaccgtctagctacactggcgatgaaggagagggaaatactggctgggaaggccacgaagaagacgactactgagaagtgtcaatgcccagcgtgtgactgggcgtcaccatattgcaaccactgaaaggagaaccaacatgtttaaacttatcgaagtgttaggccgtctggtcatcgcactgtacatccgtgaagccaaggcactggacaaagcgtccaaggtggaagcgaaagcagccgctaagctggctaaggcagccgacaaggcacgtcaggcatcactggatgcaaccgcagaggcagcgaaagttgcacttaaagctcagaaacttaaggagttcttctaatgactaccaaagtatccacaactatccgtctgtccgacacggttgaccagtggtctcgccgagtacacgttaacgttcgcaaccagaaggtgaccactgtgtaccgctggaagtccaaagacggtcgcgaccacactcagcgcatcacccttaacgatgaccaaacgtctcgcctgttggcagctctagtcaacgcacaggataaggtaatgtctggcgacgagtcccgcaaaaaggcgttcggagagaagctctctaagtccattctgtgataaactcaaggtcattactatatgtagtggcctttatgattatcatacacaacatattgaggagttacaccatgcgtaaacaatcagaaatccgtgcagacatcgagaagctgaacaaggagctggaagctgtcaaggttcacgaagccaagctcaacgctgctgtacacatcctgactaacttagggtggacccacagcccactgaagggctggcagaagccagagccaaagcgtgactggaaggagttcgaccgcgacaatatgtgtccctacaaagctggtgactttctgcgagccatgggtgaatactacaaggtagaatcagtccacggtaccgtagtaagggcacagcgaattcttgtggcagacccttatttcgtgcgagttgtcaattatttcaccgacattcctgtcaacattacgaacacggccccagctacacgtcaggaaatcatcaagcacttcgctaagtaatccaacaggagaccactatgttagtaaccgatatcgaggctaacaacctcttagagaaagtcactcagttccactgtggcgtcatctacgactacagcacggatgagtacgtatcgtatcgaccttgggacttctcagcgtatctcgatgcgttggaggctgaggtggctcgtggtggtctcatcggattccacaacggccacaagtatgatgtcccagtgttgaccaagctggctaagctacagttaaaccgtgagttccaccttccgcgtgagaacgtagtggacacactggtccttagtcgtttgctgtttgcgaacatcaaggactccgatatggccctgctgcgttccggtaagttacccggtaagcgcttcgggtctcacgctctggaggcgtggggttaccgcttaggcgagatgaagggtgagtacaaggacgacttcaagaagctccttgaggaacagggagaggactacaccgatggtgctgagtggattagcttcaacgagccaatgatggcgtataacgttcaggacgttgtggttaccaaggcgctcttagagaagctactgagcgacaagcactatttcccagcgggtatagacttcacggatgtgggggagacaaccttctggtcagagtcctgtgaggccgtatggctggagcaccgggcagcttggttactcgctaagcaggagcgcaacggattcccgttcaacaccaaggccattgaggaactctatgttgaactagctggtcgtcgttccgaactccttcagacactcaccgacactttcgggacttggtatcaacccaagggcggcactgagttattccttcacccgcgcaccgggaagcctctgggtaaatacccacgagtgaagtaccctaagcagggcggcatctacaagacgcctaagaataaagctcaacgcgagggtcttgaaccctgcgagctggacactcgggattacgtagagggcgctccgtatacaccagtagagcacgttgtgtttaacccaagtagccgagaccacattgcgctcaagttgaaggaagcaggatggatacctacagagttcaccgataaaggtgcacctaaggtagatgacgaggtccttgagcatgtgcgtgtggaagaccctgagaagcagcgctgtatcgacctcatcaaagagtacctgatgatacagaagcgcatcggtcaggcggctgagggtgacaaagcgtggctacgttacgttcaagaggatggtaaaattcatgggtccgttaatcccaatggggccgttacaggccgagccactcacagttttcctaacttgggacaggttcccggagtccgttctccttatggtgagccttgccgagccgcattcggcgcagagcatcatcttgatggtctcactggcgaaccgtgggttcaagcaggtatcgacgcctcgggtctggagctacgatgtctcgcgcattttatgtccaagtacgataatggagattacgcggatgttatcctcaatggtgatatccacactgtcaaccaacaagcagccgagcttccaactcgtgacaacgccaagacctttatctacggtttcctatacggggcgggagatgagaagattggacaaatcgttggagcaggtaaggaacgcggaaaggaactcaagaagaaattccttgagaacactccagcaatcgcagcgttgcgtgaaggaatccagcagaccctcgtcgagtcatccagatgggttgccggagagcagaaagtcaagtggaaacgtcgttggattaagggtctcgatgggcgtaaggtccacgtacggtcaccacacgcagcactcaacacactgcttcagtcagcgggtgctctcatttgtaagctgtggattgtcgagactgaagagttacttctcaaagctggcttaaagcatggctgggatggtgacttcgcctacatggcgtgggttcacgatgaaatccaagtagcgtgtcggaccccagagattgcacagcaggtgattgatactgcgcagcaagctatgcgtaacgtgggagaacactttaagttccgttgccgtctggatacagaaggtaagatgggtccaaactgggccgtatgtcactaataatacaggagatttatcatggctattaccaagcgtgtgtgcgtaagttttgatgctaagttggtactgtctaccgaagatgtcgagaagattactaaagacctagtggtagcctccaagggtttccttgagggtaagccgacagatggttacaagctggctggtatcgaggctgctgtaactgatgggccggaagcggcaatcgagctggcactgaagggcatcatcaccaaagagcttaaggctttactgaatgagatggagttcaactccttcggtaacttccgagtggggttcaagcaatgagcgagtacctaaaagttctggcggccctcaagggttgccctaagtcctttcagtcgaactacgtacggaacaacgctgcgttagtcgctgaggctgcgagccgtggtcacatttcgtgtctgaccatgagtggtcgtaatggtggcgcttgggaaattaccagtgccggagtgaaattccttaagacccatggaggttgtttatgaaggactttttaggccaagaggtatcagtgggtgaccgcgtggtgattacctcgtacggtggctacggacttactgaaggtatcattgagaagatgagcccaaagaccgtagtggtacgcacaagccccggcaagtatggtacaacccgtaaggggcctgagtatttcgtaaagattcaggaggttagcgatgagtaagcacacattgttatccttcagcgactaccgggcaacccagaagattgccaagggtgtccttgtgatggatggcgactggctggtattccaagccatgagtgccgctgagttcgatgcctcgtgggaggaggagatttggcaccgttgctgtgaccacgctaaggcccgtgagattctggagaactccattgaatcctacaagggccgcaagaaggcgtggaagaatgctgacgttgtcctagcgttcactgaccatgtcaactggcgtaagctgctggtggacccaacgtacaaagagaaccgagctgtcactaagaagcctgtaggttacttcgagttccttgagtccgtctttgaaacctacacgtgcgtccttgagcctcggctcgaaggtgatgacgttatgggaatcatcgggtctaaccctctcgtgtacaactacgagaaggccgtgctggtctcctgtgataaggactttaagaccatcccggattgtgacttcctgtggtgcactactggtaacatcctcgtgcagacgcaggagaccgccgactactggcacctcttccagactatcaagggtgacatcaccgacggttacggtgggattcccggatggggcgataccgctgaggacttcctcaaggaacccttcattgtggagcctgtaacgtccgtactgaagtccggtaagaacaagggccaagaggtaaccaagtgggtgaaacgcgctcctgagccgggagagacgctctgggactgcattaagtccattggtgccaaagcagggatgaccgaagcggaagtaatcaagcagggccagatggctcgcatcctccgttctgatgagtacaacatcgagactggggagattactctatggcaaccgggcagttaattctcatcgtcctgaccatgggcttaatagctcgtggtctctggatgttggccttagttatcaagcagatagctgaccacaaacgcaagtgataaactcatgggcactaattaggtagcactatagggaagtgcccattatgattattacttaaagattacttaaagaggagactcaaatgttaaaacctatagagcatatccttaacaatcctaatgaccttcctgacgtaccgcgagctgtcaaggaatacctacagtctcgcttcaatgctgacttcctgtatcaatcagaggtccgtaagcttcgtgaagctggccacagtgaggagttcatctccggtgtactatatggccacttcatggcttctcgtgtccttgatgagatggaggcccgtcagcgtgcactcaaagaaggagattgattatgtgtttctcacctaagatgaaagcacctaaggtcgacacaacggttgtccctgagccagcaccacttaccgaggaaccaaagggtatccagtacggtggcgatgaggactcaaacagcaccactcctgaggtatccggtcgtaaatcactcaaggtggccaagacgactgagcctacagggtccagcagtaaaatccgtaagtcagctttaggaggctaacatgggactgttcaagaagattaagaaggccatcaagaaatccattaaggctccgctacaggcggtaggtctggctggggcagatggtgcaccgcaagcagccgcagagacaccggtggcagcaccacaggaagcaccgaaagaagtcgtagaggacgttgaggcttcagcggacactgagtctggcaagaagaaaacccgagcgtatggcaagaagtcactctcagtttcccgcagctcaggcggtgggattaacctgtaaggaggtgacctgtggcagaagttaaactcgaaggcttcgcagaggagggagccaaggcggtatacgaccgtctgaagaacgaccgacaaccttacgagacacgagcagagtcctgtgcgcagtacacgattccctcgctgttccctaaggactccgataacgcatcaaccgattatacgactccgtggcaatccgtaggtgctcgcggcctgaacaacctagcgtccaagctgatgctggccctgttcccgatgcagtcatggatgaagttgaccattagtgaatacgaagcgaagaacctactgggtgacgctgagggtctcgctaaggttgatgagggtctctcaatggtagagcgaatcatcatgaactacatcgagtccaacagttaccgggtgacgctctttgagtgtctgaagcaactgtgtgtggctggcaacgcgctgctgtacttaccggagcctgagggttacaccccgatgaagctctatcgcctgaactcctatgtggtccagcgagatgcgttcggtaacgtacttcaggttgtgacccttgataagattgcgtttaacgctctaccagaggatgttcgcagccaagtggagtcagcccaaggtgaacagaaggaagacgctgagattgacatctacacccacgtgtacctgaacgaagccggggatggttaccagaagtacgaagaggtagccgaagaggttgttccgggaagtgaggctgagtaccctctggaggaatgtccgtacatcccggtccgtatggtccgaatcgatggtgaatcctatggtcgttcctacgtggaagagtatctgggagacctcaagtccctagagaacctccaagagtctatcgttaagatggccatgattaccgctaaggttatcggtctggtagacccggcaggtatcactcaggttcgccgactcacagcagcacagtctggtgcattcgtaccgggccgtaagcaggacattgagttcctccaactggagaagtccggcgactttaccgtagcgaagaacgttagcgacaccattgaggctcgcctatcgtatgcctttatgctcaacagtgcggtacaacgtacaggagagcgagtcacagctgaagagattcggtatgtggcgtcagagctggaagatacccttggcggtgtctattcgattctctcgcaggaactccaactgcctctggtacgagtgctcttgaagcagctacaagccacgcagcaaatcccggagttacctaaagaggcagtcgagccgacaatcagcactggccttgaggctattggtcgtggtcaagacctcgataagttggagcgttgtatcgccgcatggtcagcccttaaggctctcgaaggtgatgatgacctcaacttggctaaccttaagttgcgcatcgctaacgctatcggactcgacacggctggtatgttgctcaccgaggaagagaagaacgccctactggcacagcaaggcgctcagattgctacgcagcaaggggccgcagcgctgggtcagggtatggccgcacaggctactgcaagtcctgaagcaatggctcaagccgctgattccgtgggtatgcatccgggtatgtaattaggtagcactatagggagacagacagttcctctcggtctgaccgatgtcttggtctgtcatccctcttagtattaactttaaggagattgaaatggctggcgaatctaacgcagacgtatacgcatcctttggtgtgaacagtgcagtgatgactggcagtacacctgaggagcaccaagaaaacatgttggctcttgatgttgctgcccgtgatggcgatgatgcaatcgagcttaacaacaacaatgatgacccgtatggctccgataaggacccgttcggtgagcctgaagagggccggatgcaggtccgtatctccgctgatggtgacgacgaagagtctaccgaaggtgaagaacctcaggacggcgaagaagaacagcagggcgacgaagagagtcagccggaggaagtaaccgacgagtatgaacctgaagagttcaaacctattggcgaaactccggctgacatcaacgaagcctctaagcagttggaagaacatgaagctggctttaacgatatggttgctactgcaatcgaacgcggtctctcacaggatgctgtgacccgtattcagcaggagtaccagaatgaagacagtttgtccgatgagtcttacaaagagttagccgaggctggctacagtaaggccttcgtcgatgcgtacattcgcggtcaggaagctctggtcaatcagtacgtagacaaagtgatggacttcgtgggaggccgtgagcgcttccagcaggtctacggtcacatgcagaccaataaccctgagggtgccgaggcgctcatcaaggcctttgagtctcgtgatgtagctaccatgaagacgattctgaacctagcgggacagtctcgtgacaaaacctttggtaagaaggctgagcgcactattaccaagcgtgcaaccccagcgaaacctgtggcccgtaaggctgaaggcttcgagtctcaggccgagatgattaaagctatgtctgacccacgttaccgcaccgactccaagtatcgtcgcgaagtggaacagaaggttatcgactctaagttttaattaggtagcactatagggagacacatccggttctactgtaagtccgattgacgggttgtagagtttgtgctcccttcgagttacacaatgagtatcacctcgtttcaagtagtaactgacgcgaccttagggcaagaccttattataggcgcggagaatcaccacaagagcttggcaacgataggcccgtttggtcagcgtaatgactattctattcgtaaacaacataaggagattcaacatggctaacatgcaaggtggacagaagctgggtaccaaccaaggtaaaggtcaatccgcagcagacgcactagcgttgttcctgaaagtattcggcggtgaagtcctgaccgctttcgctcgtacctctgtgaccacttctcgtcacatgcagcgtcaaatcagctccggtaagtccgcacagttccctgtgattggccgcaccaaggctgcttacctgcaaccgggcgagtctctggatgacaaacgtaaagacatcaagcacaccgagaaggtaatccacattgatggactgctgaccgctgacgtgctgatttacgatatcgaagacgcgatgaaccactatgacgttcgctccgagtacacctctcagattggtgaatctctggcgatggcagctgatggtgcagttctggccgagctggctggtctggttaacttggcggattccgtcaacgagaacatcgcgggtctgggcaaaccgtccctgctggaagttggcaccaaggctgacctgactgacccggttaaactgggccaagcggttatcgctcagctgactatcgctcgtgctgctctgaccaagaactacgttccgaccaacgaccgtacgttctacaccactccagacgtgtactctgcgattctggcggctctgatgcctaacgctgcaaactatcaggctctgattgaccctgagcgtggtaccattcgtaacgttatgggcttcgaagttgttgaagttccacacctgaccgctggtggtgctggtgatgaccgcccggacgaaggtgctgaagcgaccaaccagaagcacgccttcccggcaactggtggtaaagtcaacaaagagaacgttgtgggcctgttccagcaccgttccgcagttggtaccgttaagctgaaagacctggctctggagcgtgctcgtcgcgccgagtatcaggctgaccagattatcgctaagtacgcgatgggtcacggtggtctgcgtccagaatctgctggtgcgctggttttcaaggcggcctcagcgtaaatacctttagtgctcggacggtaaccccgtctgagtatgaggtgcagactgtagctattaatggtgattcgcttaaggtagcactcgatgggctggaaggagtaacggattggtcaagccttgaggtaacctatggtacttcagggattgccagccacactcgccgtaccaacacgctgtacttcaaaggaatcgctgtaggcgaaactctggtgactgtcagctttgacgggtctgaaatgaagtcctttaagctggtcgtgactaactaataagccaaacccccttggggaccactcacggtctctgaggggttttttcgttaggagcttacattatgaacatgcaagatgcttactttgggtctgccgctgagctggatgctatcaacgagatgctcgcagctatcggtgaatccccagtgaccacccttgacgaagatggtagtgcagacgtagcgaatgcccgtcgaatcctcaacaggattaaccgccagattcagtctaaaggttgggccttcaacatcaacgagtcggccacactgacccctgacgcggacactggacttatcccattccgtccggcctacctgtcaatcctcggtggccagtacgtcaaccgtggtggttgggtgtacgacaagtccacagggacagataccttctctggggcaatcacagtgaccctaatcacacttcaggattacgatgagatgcctgaatgcttccgccagtggattgtcaccaaggccagccgacagtttaactctcggttcttcggtgcggaggacgtagagaactcactggcacaagaagagatggaagcccgtatggcgtgcaacgagtacgagctagacttcgggcaatacaacatgcttgatggcgacgccttcgtacagggtctcatcggacgctaacagtaaacttaaggaggaccaaatggctctcgtatcacagtcaatcaaaaatcttaagggaggcattagccagcagcctgaaatcctacggtaccccgagcagggtactcttcaggtcaacggttggtcctccgagactcagggcctacagaagcggcctccaatggtattcatcaagtccttgggggaccgtgggtaccttggggaagacccatacatccaccttatcaaccgagatgaattcgagcagtattacgcggtgttcactgggaacgacgttagggtgttcgacctgtctggttatgagtatcaggtacgcggtgagcgctcgtacgtcactgtgaataaccctaaggataacctacggatggtcaccgtggctgactacacgttcatcgttaaccgcacccgtcaggtcctagagaaccagaacatgactaacggtggaaccttcaaggacaacgtagacggtctggtgaacgtgcgaggtggtcagtatggccgtaagcttgagattaacatcaacggggtgtgggtaagccaccagcttcctccgggtgataacgccaaggatgacccaccaaaggttgacgctcagaacattgcggcagcgctagcagacctcctgaggacagcacacccaacgtggacgttcaatgttggcactgggtacattcactgtatagcccctgctggtgtcacccttgacgagttccagacgcgagacggttatgcagaccagttgattaacccagtgacacactacgtgcagagcttctctaagttaccgctgaatgcgccagatgggtacatggtgaagattgtcggagacacctccaagactgccgaccagtattacgttaagtatgacgtggcgcagaaggtctggaaggaaactgtgggttggaacatctcgactggccttgagtatcacaccatgccttggactctggtccgtgcagctgatggtaactttgatctgaattaccacgagtggaaggacagacgcgcaggtgatgatgacactaacccgcagccatcctttgttaactccacgattacggatgtgttcttcttcaggaaccgcttagggttcatctctggggagaacatcgtgatgtctcgtaccagtaaatacttcgagttctacccgccgtcagtcgctaactacaccgatgatgacccgcttgatgttgctgtgagtcataaccgcgtgtccgtgctcaagtacgctgtgagcttcgctgaggagcttctgctgtggtccgacgaggctcagttcgttctgtcagcaaacggtgtgttatccgctaagaccgctcagctagacctgactactcagttcgatgtgtcagacaaagcgaggcctttcggtatcggccgtaacgtctactttgcgtcaccaaggagttccttcacgtccatcatgcgctactatgcggtacaggatgtcagctctgtgaagaacgcagaggacatgacagcccacgttccgaactatgtacccaacggagtctacagcatcaacggctcgggcactgagagcttcgcgtgtgtgctgactaagggtgcccctagcaaggtatttatctacaaattcctgtatctggatgaggacattcggcaacagtcttggtcacactgggacttcggagagggagtcgaagtgatagcagccaactgtatcaactcaacgatgtacctcctgatgcgcaacaggttcaccacgtggattggtgcggtagacttcaagagtgagtccacggacttcccgttcgagccgtacaggttccatgtggacgccaagaggtcctatcacatcgctgaaaacgcatacgacattgagactaaccagacggtagttaacgtcaaggatatctacaatgcctcgttctcaacggggacagtggctatctgcgagagtgacggcaagattactgagtatgagcccaccggggactcttgggattccaccccagacatccgaatcaacggtgacgtttctggtaaggatatcgtaatagggttcctgtatgacttccagtatgtgttcagtcggttcctcatcaagcaggaacagaacgatggaacaacgtccacagaggactctggacgcctccagttgcgcagggcatgggtaaactatcaggacactggtgcgttcactgtgagcgtcgagaatggtaaccgtacgttcaactatctggttaacgccagagtgggatcgactggtctgcgtcttggccagaaggccacaaccactggtcagtatcgattcccggtgactggtaacgcactgtaccagaaggtgtcactgagttccttcaacgcttccccggtgtcaatcattgggtgtggctgggagggtaactacagcagacgcgctaacggtatttaactaaatgtctccctgtggtgtgaattaggtagcactatagggagaccactactataggggacttaaagcatgtacataagaaacactgtaagtaatgacttcgagttattcgtcccggcctaccatgacgtacttgaggcacaggccatgggtattgaaccatcgttcccagcggttactgagtgtgtcacgttagaccacgatgggtttcctctggctattggtggacactgtggagaccagtgctggttcgtaacgagtgaccaagtgtggagactcgacagggccagtaagttggagttccgcgagagaatcatggagtacagggatatgttattggatgtatatccagtcctgtggaactttgtgtgggtcggtaatggaccccataagcgtttccttaagtccatcggtgcggtattccatgaggagtacacacagagtggtaaattccaactgttcaccataactaggaggtaacgattatgtgctggatggcagcaataccaatagcaatggcagcggtgcagtctgtaggtaacgctcggaatgccgctaaggccactgggttacagaacgaccagatgcgccgacagtctgcacaaatgattaaagagtcaaacattcagaacgctaacgccagccttgagcagaaacagaagctcgaagaggcaagcgccgagttatccgctaagaatctcgacaaggttcaggccatgggtacaatccgtgcagccatcggagagggcaaccttgagggagccagtatggaccgcatacagagaatcgaagagggcaagttcattcgtgaggccaatgcggtcaccgataactaccgccgagactatgcgtcactcttcgctcaacagcttggtaactctgagtctactatggaccaagtgaaggccatgcagaaggctgaaggtaaaggtaagtctaagctggagcaggtactagacccgctggctcttatgggttcacaggcagcgtcctcgtacgcttccggtgcgttcgacagtaagtccaccaaggccccaataagtcaggcccaaggtaccaaggtaggaggtaagtaatggctagtaaattagaacaagcattgagccaaatgccacaggccgggtctactcgtatccgtggtggtgcagcgtccatgcagtatcgcccagtgaccatccaacaggaaggagcccgacagtctaacctagtgcagtccttagcgaagtttgggacagctatgggtgaggcgtacgatgcatacgacaagcgccagcgagataaggccgaggagcggtccgatgagattatccgtaagttgaccccggaacaacgtcgagaggccatcaagaatgggacactgctgtatcaggatgacccgtacgctatggaggccctacggttcaagactggccgcaacgctgcgttcctcattgatgacgacgtggcacagaaggtccagaacggtgagttccgtacccgtgctgagatggaagagtatcgccacaagcggttgacagaaggtgccacagagtacgctgagcagttcatgattaatcctgaggactcagagttccaacgagggttcaacgcgaacatcactgagcgtaacatctcgctgtacggtaagcacgatacgttcctgagcgagcaagctcagaagggtgccatactggcctcgaaggttgaactgtcaggcgtacttaaagaccctgccgttctggctcgtccagagtccggtgagttcttccagcgctacatcgacaacgctatcaagaccggaagtatccctagcgatgctcaggcacagcaggttatcatcgggtctcttaatgacgtcattcagcgtccgggtgctaccaacttcttgcagagccttgagggccgtaaggtcacccttaacgggaagaccacgacctataaggaactcatgggtgaggagcagtggaacgccctgatggtcaaggcccaatctactcagttcaacaatgacgctaagttgtccgaaggtttccgccttgggattaccagcgcgttgaaccaagacgacaccagcaagggctgggagatgcttcagggtgccaaggcggaacttgaccgtctacagcccggtgagcagatgaccccagagcgtgagaggttgattcaggccgaggagcagatgcagacacgtttccgtcaggaggcccaagcggcagccaaggagatggacaagcgtcagaaaaccatcaacaagaaccaagtgattgaccagcagttcaccaagcgtatcgacggtcagtatgtgtccaccagttacaaggacatgccgaccaatgagaacaccggagagttcacgcacagtgacatggtgaattacgctaacggtaagctggctgagattgacgggatggaactcacggagcaacagaaggaccgcatgaagctgagctacctacgggcagactcagagggtggagccttccgtaccgttgtgggccagatggtcaccgacgccgggtctgaatggtctgccgctgtgattaacggtaagttacctgaggataccacagcgatgaacaagctgcgctccatgcgtaacaccgacccggacctcttcgccgcgctgtacccggacaaggccgacctgttcctcacgatggacatgatggacaaacagggtatcgaccctcaggtcctcatcgacgctgaccgctctcgccgtagtctcaccaaagagatgcagtacgaggacgataaggcgtgggcgtccctgaagaacaactcagagtccccagagctgtctcgcattccggctagtctggatggcatggcccgtaagatttacgacagtgttaagtaccgtacagggaacagtgacatggctatgcagcagaccgacaagttcctcaaggaatccacggtgactttcaaaggtgatgacgtggatggtgataccattggtattatcccgaagaacatcctacaggtcagtgatgaccctaagagctgggaacagggccgagacatcctcgaagaagcccgtaagggaatcatcgcggctaacccttgggtgaccaacaagcagcttacgatgtaccagcagggcgattccatctacatgatggacaccaccgggactgtgcgtatccgctacgacaaggagctactgactcgaacctatcaggaacagcagcagcgtctggctaaggaagccgaagagaaagcactgaaggaagcaaccaagcgtgcacctatcgccgcagccactcaggctcgtaaagcagcaggtgagcgtgtcagagctaaacgtaaagccactccgaagttcatctatggaggtggtgaccaataaccattaaggagacaacatgagctacgataagtctaaacctagtgattacgatggcattttccagaaggcagcagactctcatggggtttcctatgacctcctgcgcaagttatcgtttaatgaatcatccttcaaccctaaggccgtctctaagactggccctaagggaatcatgcagttcaccaaagcgacggcccggagcatgggcctcaacgttactgaaggtgatgatgatgggcgctacaacccagagttagccattgacgctggcgctaagttgcttgctggtctcgttaagaaatacaacggtgacgaactgaaagcagccctagcgtacaaccaaggggaaggaccagagggagcccctcagctccaagcgtacgacaagggagacttcgggtctatctcggaggaaggtcgtaactacatgcgtaagctgctggatgtggcccagagtccacactcaggcgcacttgaggcgttcggcggtatcaccccaaagggtaaagggattcccgcagaggatgccttcaagggcatctccaaggctggaaaggtaggtactgaactgccggagtcccatgggttcgacgttgagggtgtagctcaggctgcgcccaatactccatacgccaaggacttctgggagaagacggggacgactatcgacgagtacaactcacggtcaaccttctttggcttcggggatgctgctagtgcagaactccagaactccacattaggtgtggccttccgtgctgcgcgagctgccgatgggtacgatgtgttcaaggacacgatgaccccgactcgctggaactcttacgttccctctaaggaggacttgcagaagctgagggactccgggttacctccaagttactacggtgtggtgactggcggtgacggtgagaactgggacgcactcatcaagatggccaaggataacttcgcggctgaccaaagggcagctgaggctggtactggtgcgaaacttgctgctggtgttgttggagccggtgtggacccgttgagttatgtacctctggtcggtgtgaccgggaagagcatcaaggtggtcaataaggccctgcgtgtaggcgctcaagcgggtgcactcaacgttgcctctgaaggtatccgtacgtctatcgctggtggtgaagctcactacgctgatgcggctcttggtgggttactgtttggctccggtatgtcggctcttagtgacgctgtggccgctggtatccgtaaggcccgtggtgttgaatccgtgaatgagttcgctgggccagcactccgcatggaagcacgtgagactgctatcaacactggtggtcacgatacttcaacgttgcctcctgagaacttctcgttcgagcagaatcacaaaggtgtaccgtttgctgaccatccgaccgaagatggcgcagtggttctggccaatggttccatcctgagtgataccaacccgcttaacccaaggactcaacgtgacttcgcagagattgacccagagcgtgcagcccccggtatcaagctcggtgggttcacggagattggcctgaagaccttagggtccaaggatgctggtgttcgtgcaatcgctcaggacctcgtgcgctctccaacagggatgcaatcagggtctagtggtaagttcggcgcgaccgcttcggacatccatgagcggctccatgcgactgaccagcggatgtataaccagctgtatgacgctgttgaccgtgccatgaaggacccagagttctccgtgggtgagcagaagatgtcacgcagagctatccgtcaggaagtctacaagcgtgctgccttggcgattgagcgcccagagttacaggctgatttgaccaaaggtgaacgtgaggtgatggacctgctgaaagagcacttcgacaccaagcgtgaactgatggaacagccgggtatcttcggtaacgctaacgccgtgagcatcttccccggtagtcgccacaaggggacctacgttccaaacgtgtacgaccgtggtgctaaggagctaatgactcagaagctgggtggacctgaaggactccaacaggctatcgctcagagctggcttaccagttaccgagtaagacctgaggtcaaggcccgtgtggacgagtaccttatggaactcaacggatacaagtcggttgaccaagtgactcctgaggtggtccagaagcacgctatggataaggcgtacggtatcagccacactgaggacttctcagcgtccagcgtcattgatgacagcatcactggtctggtcggtatcgagaacaactcgttccttgaggcccgtaacatgttcgacagtgacctcccggttaccttgccggatgggtcaaccttcagtgtcaacgaccttagggacttcgacatgtcacggattgtcccagcgtatgaccgtcgagttaacggtgatatctccatcatgggcggtagcggtaagaccacgcagcagctcaaggatgaaatcatggcgttagacaagagggcagaacgtaagggacaacttaagggtgaagtggaagcactgaaggacaccgttaagattctcactggacgtgctcgtcgtaacaacgatacagcctttgagactgctatgcgaaccttgaatgacctagcgttcttcgctaagaacttctacatgggcccacagaacctcaccgagattgccgggatgttggccaagggtaacgttaaggcgatgctccacggtatcccaaccctgcgtgacctagcaaccaagacctctccggtgtccggtagtgaacttcgtgatatccatggtgcgctgttcggtaaggaacttgaccagttaatccggccggggcgtgaggatatcgtacagagaatccgtgaggcctccgataccagtggagccatggcgtcagtcattggcaccgttaagtttggtactcaagagttgtcagctcgttccccttggaccaagatgctgaacggtaccgctaactacattctggacactgcccgtcagggtgtactcggtgatgtggctggtgctgctctcggtggcaaaggctccaagttcggaaaagagaacttcctcaaagccgcttctatcagtcctgagcagtggaagggaatcaagcaactctttgttgaccacgcgactcgtgatgctaatggccagttcaccatcaaggacaagaaggctttcactcaggacccgcgagctatggacctgtggcgtcttgccgataaggttgccgatgagactatgctgcgacctcacaaggtatcacagcaggactccaaggcgtacggcgctggcgttaagatggccatgcagttcaagaacttcaccatcaaatcactcaacgctaagttcattcggtccttctacgagggctacaagaacaaccgcgctatcgacatggcgcttacccacgtgttgtctctgggtatcgctgggacctactttgcgatgcaagcccacgtgaaggcttacggtctccaagagtctcagcgtaaggactacctgaagaaagctcttaacccgactatgctgggctacgcagcgttgactcgaagttcccacactggtgccccgctgtctatcgtttcgatgatggctggtgccgctgggttccaagatgccaacatgctccgttccaccatcttaccgaaggacgaacagttccagaagaaggatggtgcagccaagggccgctctgagtccagcgacctagcgggtaacttagggtctcaggttccggcactgggttacgtagggaacgtcattgcgaccgctaagaacgcttacggtgttgctacagcacctaacaagccgactgagcgtgactacatgactggcctgatgaactccaccaaggagcttgtacctaacgacccgctcacccagcagctcataatgaaaatctatgaggcaaacggtgtgaccatcaagcaacagcctaaacctaattaattaggtagcactatagggagaccgcttggtttcccttctcattcactttaaggaggtcataatggaccaagacattaaaacagtcattcagtacccagtgggagagactgagtacgacatcccgttcgactacctgtcccgtcgcttcgtcagagtgtctctggtctctgaggattcccgtagactcctgagcaacatcactgagtaccgctacgtctccaagaccagaatcaaactactggtttctactgaaggtttcgaccgtgttgagattcgtcggtttacctcagcctctgagcgaattgttgacttcaatgatggctctgtgctgcgagcaacagaccttaacgtatcacagctacagtcggcacatattgcggaagaagcccgtgatgcagccctgctggccatgcctcaggacgacgcaggtaaccttgatgcacgtggtcgccgtatcgttaacttagctcccggtattgacggcaccgacgctatcaataaggaccagttagattcaacgctgggtgaggctggtggtatcctttctgatatgaaagaagtacagaaggaaacctatgactacatcgagaaactcggtgacgacacttcgattgtccgtggggtaacttgggtgtacaaccaagggtctgccgttggtggcgagactacggtactcatcgataaaccgacacgcacacttgccgttccttacattgagattaacggtagtcgtcaagaggttgggtatcacttctcgtttgacattgccacccagatgattaccttaacggaaccactggttaccggggacttcctgatggcaatgaccacagagtctagtgtacctctggaagaccttctggctaacccgactggtgcctcggctatcggtacctccgatggtcgaaacgttcaggcaaacatcgacgagcttcgctcagagttagacttcctgaaagacactacggtactcgacgttcgccgttttggtgctgtgggtgacggtatcgcagatgattacccggcgtttcagaaagcgtgtatcgctgcgagtcaacttggcggggcaatagtccacgtaccgaccccaaaggtaaaatggaagattggattcccggtatacttgttcgaccgaacttgggtccggggtacaggcatcaactgtattgtagagttcactgacccgctgtatgcacgcaagtcccgctctgggttcgtcattgggtctggttacgaacagaaccgcgacaaggccattcagtgtcttaacgatggcacttgggccactactggctcggtggtaaatagggacttcgttgagttggaccgagggcagtacgtacgcgacaacccgagcaaggtccagtcgagactgtgccgagtgtccgggatgtacctgaaggcttcatacccgaacggtgccaccctgaagggtggctacgctgtgtccggtgcaaacgcggtagactcagaggtatttgacatctggggcgaaggttggactgagattatcaacttcgggtctgacgtaccgccagctacaccaagttgtcacaacctccatgcgtacgacatcacgtgtgttgcacctaacgactacgagacgtactacagcgcagggttcattgctaactctacaagctgctctattggccgcttcaagcagctcagggcaatagctgatggttctcctcacggttcctgtggttccatgaactacaccgagtattgctccttctacgatatcgacgtaccgagcttaggccgtacagcttcatctgagggtatccttgtgaacaactccaagggtgctgtgactcgtaacgttcgtattggtaacgctaagaccggggtggctgagtattacaccactggtgctggtatcttctacgacagagaccaacccaacgtgttcgatagcatccatgcgaataactgtgacaacgcggtagctctccgctccaagttctcagtttggaagaacgtgacgcagaccaactgtacctatcacgtctacttcgggacgaccaatgcacaagcctgtgtggtcaagttcgtaccggacacaatcggtggtggtaataacgtagacattctggacagactccgcgacaacgttgtgactggctggcgtgttcgctcactccacatccgccctatcgcctacctactgaacgacaagtcggtattgcgtagctgggatgctggtaagaacatcaaggctgagaacggtgtgggattccagtggttattccctgtgccatctaccatgcgtgcaatcactcaggttggccagtggtttaccttcgaggtgggcgcggcaactgccggaacagaggtcaaggtgcaggtgcgccgaatgtcagcatacaacggagacgccaatgagcagcctgtaatcctctttgagaacagccgaaaggcctctctggataccgtacaggcgaccaacgttgtagcgaactcttctggtctggtcttgacgtcccctacggatgggctggcaaacgctgtggatgtcctcgtgagtgttacggcaccgaccgttaacttcaacatgaaagaagctcgcatcacgtatctgggcgactaactaaggagacagtatgttaaacaaattgaatcaaccaaaaggctctacaattggtgtgctcaaggatgggcgcaccgtccaagaggcaatcgacgagctggagaagattaagacccgcaacgttgaccctgagcgcttccgtgagacgttgacgtcaagtgacgatgaggtattcgagaagctgttcgcgtggttggccactcagtcagacgttgtgggaacctcaagttcttcctacatcacagccttaccgcgtatgattgagcttggaggtcgtacctacacgttgactaagcgtcacgtattggatggtaacttcggtattcagaacggtactatcctgatgtccggtgagggcgagattatcatgggcctcgacgcaggtactaagactcgtcgccacttccttaagtatgtgcatttcgagtacatcggggaatccgaccgcagcacctctctggtcaccatggcacgctgctttaactctgtggtgctattctgtaacttcatcgctggtggtgataccgctcgcaacagagcacctcgtacccgttatggcctgttcgcagggtccacccgatgctggggcttccagttaatcggtggtgagtattacggtggcgactgtgcgttgcgtgttggacgcgctaacgaccacactgggttgaccattcgtcccggtaccgtccaccactctcgtgttatcaacatgatgttgtgtaacccagcaggtgccgaggtgtctggctgtaacattgaacacgcagacaacggggcgattgggctagggattacctcgggtaccaatacatccggtaacgcagcccatggtgttcgcatcaacggtgtgtacttctacaacaacggtaatggctccagtggctcaaacgtagcacctgcgaatattctcattggcaaggacattccgggcaccgaaggttgggaccgaccgggcgagctgattacgtcaagtcgaaacaccgcgcacagtattacggtgtcagagtgctacatcgttagcccgaacacccagaacgcttggcaggttaacgccctgtacggtgtgtccttcttggacaacaaagtgggcctcaaaggtgacgctacgattcacggtgtgtatgacggtacgtgtgctaactgctgggcggttggtaaccgagaccaaggcggcaaggtgttccagttctcctctacggcaaccaacgcgattctgactaccagaaagggtaagtggactccgaagattatcggcgagggcacagcaggtaacacgacgctgagtgcttctggtggtgcgtactctctggataacggaatggtcaccgtgtcgtgcttcgcagtggttgacactaaggacccaaacatggctggcaacctgaacatcaaactcccggtagcctgtgaggaccagcagcggggcggtacaggtatatcgttgacgaacgtcccagacgtgccgagtcctaacggtagcatcattgtgataggagacactgcgcgaatcatgctggggtctgcgagattacagccagcgaacgtcacgactggtaccgccatccacttctcggtgtcctacccagcagacgttaaggtataaggaggtaacatgctgtccctagacttcaacaacgaagttatcaaggcggctcccattgcgggggtcgctggggctgacggtgtagcgaggctcttttggggcctctcactcaacgagtggttctacgtcgcggcaatcgcctacacagtggttcagattggtgccaaggtagtcgataaaatcattgactggaagaaagctaataaggagtaacacatggacctgattaagttcctcgaaatgttagacactgagatggctcagcagatgctcatggacctgaagaatcctgagaagcggaccccccagctgtacaacgccattggtaaactactggagcgtcacaagttccaaatctctaagctgacccctgacgttaacatcttgggcggactggctgagggtctggaggcttacaactccaaggtgggcgctgatggtctgacagaagacgataaatacactcactgatggtaatactcaaggttcctgagggagcctttatggattatcaatagtaggagaataaaatgaactggatgttattctggattatcgtagacgtggtgtttgcggtaggtttactcgtcaccataactagtagtagccctagggctggtcactatgaagacggtgcaggttaggaggcattatgctggaactcacaaagagaatcgtcccgtatcttgtggctattatggtgtttgccttcgtgtggcacttgggttcgcaatctacggacgctaaatggaaggaggtagtacagaatgagtacgttaagaagcaaacggctagagctgaaactcagaaagcgattgacgcagtatcggctaagtaccaagcagaccttgaagggctggaaggcagcactgataggattattgctgatttgcgtagcgacaataagcggctgcgcgtcagagtcaaacctaccagtgtccccgcaggaccagacggtcgatgcctcgttgatggttccgtcgaactacacgaagcaactgctcgaagtcttatcgcaataacccagaaggccgacctcaaagagaaggccctacaggacactattcgcaagctacagcggaaaggaggtgaacattgagtaactctcagcaagtcaagaacgccttaatcattgcgcaactgaagggtgactttgtcgcctttctcttcgtgctctggaaggccctgaacctgccggaaccaaccaagtgtcaaatcgacatggccaagtgtctggcagaccctaagaacaagaagtttatccttcaggctttccgtggtatcgggaagtcgttcatcacctgtgcgttcgtagtgtggaccttgtggcgagaccctcagttaaagatactgattgtctctgcctctaaggaacgtgcggacgctaactccatcttcatcaagaacatcatagacttgttgcctttcctgagtgagcttaagcctcgccccggtcagcgtgattccgtgattagcttcgatgtaggccctgccaagccggaccacagcccgtcagttaagtctgtgggtattacgggtcagcttactggtagccgtgctgatatcatcattgcggatgacgtggagattcccggtaactctgcaacccaaggtgcccgtgagaaactctggacgctggttcaggagttcgccgcactgttgaaacctctaccaactagccgtgttatctatctggggacccctcagaccgagatgacgctctacaaggaacttgaggacaaccgtgggtactccaccatcatctggcctgcacagtatcctcgctccaaagaggaagacctgtactatggcgaccgactggctcctatgctacgcagcgagtacgatgaggacaaagagggtctcggtagtcaacctactgacccggttcggttcgactctatggaccttcaggaacgtgaggtggaatacggcaaggctggctatacgcttcagttcatgctcaacccaaacctcagtgatgccgagaagtaccctctgcgcctccgtgacgctatcgtgtgcggtctacagattgacaaggccccaatgcactaccagtggttgccgaaccgtcagaaccgcaatgaggagcttcctaacgtgggcatgaagggtgacgagatttactccttccataccgcctcaagtaacactggtgcgtatcagggtaagattctggtcattgacccaagtggtcgcggtaaggatgagacaggctggtgcgtactgtacacactgaacggctacatctacctgatggacgctggtggtactcgtggttacgaagagaagtcccttgagttcctcgctaagaaagccaaacagtggcaggtccagactgtggtcttcgagagtaacttcggtgacggtatgttcggtaacgtgttccagcctgtgctcctgaagcatcacccagcgcaactagaagagattcgtgctcgtggtatgaaagaggtccgtatctgcgatacccttgagcctgtgctggcaagtcaccgcttggttatccgtgatgaggttatccgacaggattaccagacggcacgtgatgcagacggtaagcacgctctgaagtacagcctgttctaccagatgacccgtatgagccgtgagaagggcgctgtggcacacgatgaccgacttgatgcgttagcattaggtgtcgagttcctacgctctacgatgcagcaggacgccgttaagatagaggctgaggtacttcaggagttcttggagcaccacatggagaagcccctgagtaacgtctcccagttccgcaccaccagcagcaacggtgtggacatcatgtgggatgacgatggtgatagctctatgttcatcgaatggtaactatgcagcgattatgcataaggattcattaggccacggaaggccacttttggaaaactctaagtataacagacacttggaattaggtagcactatagggagagacccaaggttacatactataagactacttaaagtttcattcatatagatatgcactttaagtctcctctatgagagggtagtgatgataatatcaccctctaactataagacactaagagccaacataaggaggacctatgcgcttattgttaactttactgcgccataggactacttggcgatttctgttggtacttgctggtgcccttggggcttcactggctactcaacagcaactcagtggactggagactatcctgtgctctgtactcacttgtagcgattagggtcttcctgatgcgctagggattccgtagtgatgcttaccagcatacaccactccatccctctatagtcaatacttaaagttaaccttaggcgactcatatggtctacctacgggtctatgcaatgacctgagggatacctgaggttacctttaagaatatgacataaagttctgagtgtacatctcacagtttacactttcagttatcccccccggtaccctctcagtaaccctaagtaaccacgggtacccctctaaaccttagggataaccttgggtggtaccttggggaatccttaggtgataccatatgttgtggtgtgggtgaccttgggatactatatgttgatgcctctgtgtccc

SEQ ID NO: 15 - DNA, 40579 bp, Unknown
  source: /note="Description of Unknown: KP3W-P0201 Bacteriophage sequence"
acccctgtggataactttaggatacctgtggataactattggtgttcctgtggataactcaaggataacctaaggtgttagggtggcttgtggataactttgggtaacctgtgggtaactttgggtgttcctgtgttcctatctgttagtcactctcaaggtatcacctaaggtaaccacctagcggagctatccgctcctaaggactcactataggtgaccattagtcatcaccatttgtagcgctatctattagtatgctgtgagagaccattagcagaccattagatgacacgttgtctcgacctgttgttgctatcgtttagcagtgactgatagtaggtcacaaaggttaatcacttctactctcgtttagcagtctcagagagtgaggagacataaggaataacaggtgagccattactataggtattatccttatgccctgtcaatagtctgtatcatcattcctggtcatcacctctttagagtccacttaaagataatcataaattaatttaaaatagttgttgacaagggttaggaccatagatattatagctctcgttccagcaacaacgggacacgaggtgatacctcactgctctttaacaatctggactacagcaaacagtgtctaccgcgagacgggcccgacaggcgacacataagcgtgacctaacattaggtaactcacaaagctcacggtgctcacacacatttagtaagtaactcatggtcattcatatggtctctgactggcattgactcagtcaccctttgagtgaccattacgatactcactaacacctacaatcaataggataaacatcatgatttacactaaagagccagccaacaaagtattcgtattcgttaccgcttatcgtggctatgagtcacacgaagtcaacgagaagatgcttaagggtctcatcaagactatccgcacctatccgggagcctacggtaatatccgtgatgagaacgtcactgggtgctttaaagaggctggtatgcctgaggctaccacagagcgaacacttaaggtcgaatgcactgagaagcaagccgctgagttaacgtggttagcgtgtcgtgtgtacaatcaagacgctgtactggtggtatactcacagactcacacagcacacttatggtctatcacatcggtgggcgagtatccgcaatcattcccgatgctcaaagaggatgcattaggtggtacgctccaacctgtggatgcgcctaaaggtgaatgctactcgattatcaacggtcaatactgggaggttgtttaatggatgtcacctacggtctcactcagacagacattaagcactatcgctggcttctctcattaggtaaaccacacgattacctgatgattcacttagcacagacttatcgaacacgaaaggtaatgtatgacaatggcgctcgcagtcataatgattctggggtactcccttatcctcacagtgttcctcagagactttcgcaagggtcttaaggtacacaaagcaacatttagttatatgaagtggggcgtactgcctcgctttaccgtaagggagcgcaatgggcgcttcaaggcaaacaaagtaggtatattctatgtcgcaacgcactaacctgaagaaagcatttaagatagcacgtatggtaatggcctacggtgcatccatgagaaagacaaaacgagctcttatacgtaacgccaacaggctacctgctcgccaacgccaatgggtaatacgtcaggtatacaacgagatttaccgacctgggatggtcccttacgtaatcctgaccgagtcaatgaaagctagaggtgttatatgagcattgataccaaagtgtacgctaacccagacattaaggactttgtagtccacatactgagcatagacaagtacgtctgggcgtcttcccagatggataccatacttcaaggtgagtacatgcgcaccgcattgttacaccgctggaagcacataggcaacaacctgaagttcaccgactgattaacattaaggacacgtaaccaaatgaatacctctatcgcagcaaacgttatccactcactggactctaagcagtctctgggaatcctgatgttcgaggagtccttgggcgtagttgagggaatcctcatgaactcaaaggaactggaagctatctctaacaaggtacgcgaggaactcattaagaacgcaatggtagtctacggcgactaatcgccaccctaacccaccacaaggaacacaatatgtctctcatgaactccatcgaacgcaacgatttcagtgacatcgaactcgcggcaatcccttacaacatcctcagcgagcactacggggcggcccttgcgaaagaacagttagcccttgagcatgaagcttatgagttaggcgagcagcgcttccttaagacctttgagcgccagatgaagaacggcgaactggctgacaacgctgctgctaaacctctggtgctcacgctgttgcccaagctggtaactcgtgtgaatgaatggcgtcatgatgaagtatacgaattgaatggtgctggagagtacgtcaagaagggcggtaagaagaaacgcgcgttttacctactggagccactgagcgctgaggccatcgcactggcgaccattaagactatcctctcgtcactaaccgctaccaatgagacatccattcaggccgctgcaagtgcactcggtcgggctcttgaggacgaagcccgtttcggtcgtatccgtgacctcgaagagaagcactacaagaagcacgttaaggaccaattagataagcgtgttggtaccgtgtacaaaaaggcatttcttcaggtggtagaagaggacatgctcagcaagggccttatgggtggtcaggcgtgggaaagctggacaaaacaggattccattcacgctggtgttcgctgcattgagatgctcattgaggccaccggaatggttgagctacagcgccagaatgcaggcatcgcgggtcttgatagcgagagcttacaactcactaaagagtacgctgacctgattaccaaacgcgctggagcactggcgggtatcagcccaatgttccaaccttgtgtagtccctccgaaaccttggacggaaattactggcggtggctactgggcgaatggtcgccgtccactggcgctggtacgtacccacggtaagaaggccctcatgcgctatcaggacgtgtacatgcctgaggtgtacaaggctatcaacattgcgcagtcaacgccttggaagattaaccagaaggtgctgaaggtagccaacgagattgtcaactggaagaactgcccggtcgaggacatcccggcaaccgagcgcaaggaacttccggtcaaacctgaggacatcgacaccaaccctgaagcactgaaggcgtggaagaaagctgcatcgaccatctaccgcaacgataaggctcgcgtgtctcgtcgaatctctatggaattcatgctggcacaggccaataagttcgccaacaagaaggctatttggtttccgtacaatatggactggcgcggacgtgtctatgcggtaccaatgttcaatcctcagggcaatgacctcactaaaggactcctgacgctggctaaaggtaagccgattggtcttgacggcctgtactggctgaagattcacggtgcgaactgtgcaggtgtcgataaggtcccattccctgagcgcatcaagttcattgaagacaaccacgacaacatcatgcaatcagcagccaaccctatcgagttcgattggtgggccaagcaagattcaccgttctgcttcttagcgttctgctttgagtacgcaggtgttgagcatcacggcttgaactacaactgctcgctaccgctggcgttcgatgggtcctgctctgggattcagcacttctccgcgatgcttcgtgatgagattggtggacgtgcggtcaacctgttgccgtctactgaagtacaggacatctatcgcatcgttgccgataaggttaacgagattcttaaggttgacgctgtgaacggtaccgctaacgaagtggaactgattaccgataagaccactggagaaatcaaagagcgcctgaaggtaggtacctcagtgatggcccaagagtggctagcgttcggtgttacccgcaaggtaaccaaacgttccgttatgacactggcctacgggtccaaagagtttggcttccgtcagcaaatccttgacgacactgtgcaacctgcaatcgacaacgggtacactggattcaccaatggtaaccaatcggctggctacatggctaagctgatttggaacgctgtaagtgttaccgtagtggctgctgtagaggctatgaactggctcaagagcgccgctaagctgctggctgctgaggtcaaggacaagaagaccaaagaggtcctacgtgctcgctgtgcggtacattgggtaactcctgatggtttccctgtgtggcaggaataccgcaagccaattcaggtccgcttaaacatgatgtttctcggtcagttccgcttgcagccaaccgttaatactcacaaggattccggtatcgacgcccacaagcaagagtctggtatcgctccgaactttgtgcactcacaggacggcaaccacttaagggcgaccgtagtacacgcccatgagaagtacggtatcgagtcttttgcactcatccatgactcctttggtaccatccctgctgacgcagcgaatctctttaaggcagtccgagagacgatggtcgagacgtacgagtctaacgatgtactcgcagacttctacgaacagttcgcagaccagttgcacgagagccagcttgaagatatgccagagctacctaagactggtaagcttgaccttcaagacatccttaagtcagacttcgcgtttgcttaagtaaatcatgcagttagcgagtcgttggttgaactttgagctaacgactcactattagagaatacttaaagtggtcttaaagattacttagagtgtttattagagatttaaattaaagatatttaacttaaagataacttaaaggtaaacattatgattatcatgctcagcgcctcgctcgtattcgcagcactggccttagctatatcctcaagcaagcttaaagcactaatggaccacaacaagcaactctccgagagggtgctaagagctaaccgagatgtgacctattacaccaagtacgcagagcgtaggaccgaagaggtgagctcattgcagcacaggcttaacgacgtatcgtatcaacgagacgtctccgtcatgaacgccaagaagatgtttgagcacaacattgagttagcccgtcgaatctcggagctcgaagagaactcccttgagaactcctcattgctgcacattaagttctccgcacgtatgcctaacggcgacatcgagaagaccactttcaagcttggagttggtccttgtgggctcactgtgaaggcccttaagtggaccgagtacgatgaccattacatccttgagcagctctgtactaacggagagattaagcgcttcaagtatgaccgggcggacgtccttggacgtatcgaacagcgcctcaagtagcaaacgactcactactagggagaccattacggtttcccttttcgcacatctatcatctggagatttaaacgctatgaacgcacgtatcaactttgagaagaccgtccgcaccgaacgcaaccgcgaagcacaggcttatgaggagtttgtgggccgcaagggtaagtacaataagactaagcgcggtggtggcgttaagggctccttccgttcccttgagcagtcacaggtcaaccaagagaaatactttgtaggagcttgatgtaatggcgattaatggggactatttatttgacggaaacactagccaatggtctagattaggatacgcagagcggagactattagatgaaaccgggctgacagtcatcatgcaccacgatatgctcagggattgcgttgtcttatcggtgtacgagcctaaaggtgacgtgctgatagagaagtcctttagtcactggtcgattgactcagcgtctgactggctggctaaactctgcaacgattacgcaagctggcgctaacgactcactactaggaacacctagcgttaaactcaaggtcatctacacaggtggccttcatgattaacactaactatcggagattgaacatcatgcaaccttttgcaaccaaaccgtataaagctgtaagtttcgtagagtcttccgtggagaaggcactagaacgtgctggctacctcatcgcagacactaagcacgatggagtccgtgggaatatcgttgtggataacacagcagattccctatggctgtctcgcgtaggcaagaccatcccggcccttgagcacctaaatgggttcgataagcgctggcagaagttactacaggacgaccgttggattttcccggatggctttatgcttgatggtgaactgatggtcaaaggcgtagacttcaacactgggtctggtctactgcgcacccaatggatgaagcagagtaactacatgttctctacttgtgaatactggcacgatgagtgggcgaagaaggctaaccgccaaccgttccacttggacccatatcagctaaaagttgtcctttacgacatcgttccgctggacgttatcgaatccggtaacgactacgaagtcatgacactgctccgcttagagcacgtcaagattatcctcccgattcttcgcgaacacttcccggaaatcgaatggtgcctctctgagtctcatgaagtttacgacatgaccgaactcaatgcactgtacgaatccaagcgagccgaagggcacgaggggcttgtcgttaaggaccctatggatatctataagcgtggtaagaagactggctggtggaagatgaagcctgagaatgaagccgatggcgtcgtcgtgggtctcgtttggggcactataggtctcgccaacgaaggtaaggtgattggctttgaggtcctccttgagagtggtcgcgtggtgaacgctacgaacatctcacaggaacttatggaggagttcacgcgagccgtggaggccacagcagaccatcacgaaggttcctacactaacccttacgatggctgggcgtgtcaaatcaagtacatggaggaaactccagacgggtccttacgtcacccatcgttcgacaagtggcgtggcactgaagagagtccaaaggagaaaatctaacgtgacacctttagaaatcatactcagccttgtcctaacgggtatcattgggttttggataggatgggtagttagcactgacgattagctaacgactcactaataggaacacaaactggagacaacattatgatgaccattaacgtcacactaatcgttgtcttcctgatagccgcctttgcgtggactatcggggacgacgacaacactaacggaccgaaaggagcttgacgaatgcgcttacattacaacaaatccaacggtatcttctcggttcgccgagcagaccgaagcaccgtagcagcaaccgagcgtcgcggtaagttaccccgcatgttcgataccttcgagctagcgcctagcgttcacatcatcgttactcgcggtctctacgaagcagcggctgaaaagtccagacctttcgtacccgtggtggtcactaagtggcctaacgtgaagggattctttatgcgtcttaaggagattatcaatgagtgatattcttattaatggacacgagaatcactgccgctcggtgctggcctttggtacttgtgattgcggggcgaagcctcagccagttaaggtagagggtggcaacgtatccggcaaacgcgcagcagactctgctgacgatggtgttaaacagccgagccattaccaactgttcgatggcgtagaggctatcgaggtgattgctcgcagcatgacacaagcgatgttccaagggtattgcttagggaatatccttaagtaccgcctacgggccgggaagaagtccgaactggcaaccttagagaaggacctagcaaaagctgagttctacactgagttgtacgaaaagcacaaggcgctgtgttatgacgccaagtgaatggtgcgaacgtaaatttgaggagaccgggaacaccgattacctcgaaatgtataacctttggaaacagagaggaatgtaacatgagtgagaaaaccgtaagagtcatggtgtttgtcctgaaggaagacgcatggcccgaaggacaacacgagtggcactcgtaccccgatggaactgtgctaatgggacgaccctctattgggttccacatggaggctggcacaactcaccgccagcttcacgccaacccattgattaaattcaaggagctacgagatgtcccagcaatttaaagtaaccgtagaaggcgctacgatgtccgtagagttacccattgaggctgactctctggaacacgcgctggaactggcggaagccgagtatgagtctatcggtgtggtcacacgggttcgacctgtggtcgcctccgagtaagacctaacgactcactaatagggaatacttcccgagacctaatccacacacaaaggagaaacacacaatggcagtaatcgcacgtaacaaaatcgtaacctctggtgtcggtacagttgagccgtacgcctacctgaccaagccggactacggtaacgaagagaaaggcttcggtaaccctcgtggtgtctacaaggcaagcttaacgttgccaaacactgacccaatgtgtcagcgcatggtgcaagacatcgtggatacccatgaggctcactacgcagagcgcgtggctgagtacaacgagaacccgcctcaggtgcagcgcggtaagaagcctcttcttccgtacgaaggtgacctgccgttcatcgacaacggtgacggtactactacctttaagtattcttgctatgcgtcctatcaggacaagaagaccaaagagacccgccacatcaacgtaatgattgtggactctaaaggcaagaagattactggtgacgcggttccgctgttcatcggtggcggctctaagattcgcatcaagtacaagctggtgccttactcttggaaccctaccgtgggcgcttccgttaagctgcaaatcgactccttccagttaatcgagctggctacctctggtggcggtgagagcgaatgggacgaagtcgaaggcggctatgaagcacagcaggaagacaacggcggctggtctgagcacgaagagtctggtgcatcctctgacgatgacgaagatttctaatggcaggctatggggccaaagggatacggaaggtgggtgccttccggtctggccttgaggacaaggtgtccaagcagttagagtcaaagggcgtcactttcgattacgaattgtggcgcatcccttacgtgattcctgcaagtgaccacctgtacacccctgacttcctgttgcctaacggcatcttcgtggagactaagggtctctgggagtccgatgaccgcaagaagcacctgttgattcgagagcagcacccggagttagacatccggttggtcttctcttcgagtcgcactaagatttacaaagggtcgcctaccagttacgctgagtggtgcgagaagaacggcattaagtttgccgataagttaatacctgtggactggttgaaggagcctaagcgttctgtaccgttcgacaggttcaagcagaagaaaggagtcaagaagtaatcatggctaaagttcaattcaaaccacgaaaggagacctctcagattttcgttcactgttcagccaccaaggcgaccatggacataggtgtccgtgagattcgtcagtggcacaaagagcagggctggctggacatcgggtatcactttgtgattcgccgtgacggcacagtagagactggtcgcgaccttggggccgttgggtctcacgttaagggctacaacgagacctctgtaggtgtctgtctggtgggcggtatcgacgctaaaggtaacccagaggcaaacttcacgcctgagcagatgcactcgttacagaacgtcctgaccacgctgaagggcgaatggcctaacgctgtgattatggcgcaccatgacgttgcacctaaggcatgcccaagcttcaacctgtctcactggctgaagactggcgagctggtcacgagcgacaggggctaacaactcactatagggattacataacgtagtccctgttgtcgcacatttactcaaactatggtcaggctaaggtgcacttggcgtagcgctgcgtttcatcagggttcgattccctgactgaccacctatcacttatggagattactttatgcgcaagttagaagatgcattcgttgtcattgtaatggggtgtgtggcgttgagcatattaacgctaacaggcgtactcgtagtttccctgctacgcaagtttatactcctatgagttacggggacgctatcgaggatggtcaggagagcatcttcctgttccatgcaccatgcgaaaactgtggttcttctgatggtaactctgtgtactctgatggacacgagtggtgctttgtgtgtcagcacagggtcccggcctcagatgaacgcgagaagaagttatcatcaagaagacccagaggagggaaaacagagatgacacaaggtggtaacgcagtgttagactttggtgccaatgagggtcggtacgtagacctgacggcccgaggtatctctaaggcaacatgccagaaagctggctactggattgccaagcgcggaggcatcacgtatcaggtggctgactaccgtgaccagaatggttcaatcgtctcccagaaactccgggataaagacaagaacttctctacccgagggtctcacaaaggcgatgcgctgttcggtaagcacctttggaatggtggtaagaagattgttgtcactgaaggtgaaatcgatatgctcaccgtgatgcagcttcaggataacaagtggcctgtcgtgtctataggacacggagcgtcagccgctaagaagacatgtagtgcaaactttgaatacttcgattcgttcgaccagattatccttatgttcgacatggatgagccgggtcgtgcagccattgaggaagccgctcaggttctccctcctggtaaggtacacgttgcggtactgaccgagaaggatgccaacgagtgcttactcaaaggcaagggtaaggaggtactcgaccagatttggaatgcagcaccttgggtacccgatggggtagtcggtgtgatgtccatgaaggaccgtgtacgtgaggccatgaccagcgagcagagcgtaggttacttgttctctgggtgtgcagagctcaacacgaggaccttaggtatccgtggaggtgaagtcgtaatggtcacctcaggttccggcatgggtaaatcaacgttcgtccgtcagcaactattaggtttcgcaagggaccaagggcttaaggttggagctgcgatgcttgaggagtccgtagaggaaaccgtagaggacatcctcgggatagccaacggtgtccgacttagacagcaacctaaggagttcaaacagaaacttatcgaagacggtacgtacgataagtggttcgatgagctctacagcagcgaccagttccatctttatgattcctttgcggaagctgaagtggaccgactgcttgcaaagttacactacatgcgcacaggtctcggctgtgacgttatcgttctggaccacatctcaatcgttgtgtctgcctcagaggaatccgatgagcgcaagatgattgaccgcttaatgacgaagctcaaagggttcgctaagtctaccggggtggcccttattgttatttgtcacctgaagaacccggagaaaggtaaagcccatgaagaaggacgtgctgtttccattactgacctgcgtgggagtgggagcctccgccagctctctgatactatcattgccttggagcgaaaccagcaaggtgatatgcctaatcttgtcctcatccgtattctcaagtgtcgctttaatggtattggtgtcggcattgcagggtacatggagtacaacgaaaagactggactcctcgaaccgtctagctacactggcggagaaggagaagaaaatactggctgggaagacccagacgacgactattaacaaccaataggagaaccatcatgattaaacttatcgaagctctgggccgtttagttgtccgcctgtacatcaacaaggcaaaacatcacgaccgcacagctaaggctgacgcaaaggtcgctgagaaactggcagcaggcgctcaacgtgcgcttgaagcatccaaagagaataccgcagaggccgcgaagtttgcagccaaggctcagaaacttaaggagttcttctaatgaccagtaaagtatcgacaactatccgcctgtccgacacggttgaccaatggtctcgccgggtccacgtcaacgtccgtaaccaaaaggtcaccacagtgtaccgctggaagtccaaagacggtcgtgaccacactcagcgtattaccctgaatgatgaccaaacggctcgcctgttgggagcgctgattaatgcgcaatctaaagtgctgttaggtgatgagcctcgcaccaaggcattcggggagagcctaagcaatctgctccagtgataaactcaaggtcatcctaacgggtggcctttatgattattactgattgacaactacggagaaaatacaccatgaaatacaccatgcgtaaacctgaagaaattcgtgcggacatcgacaagctggtcaaagagttggagactgttaagctttacgaagccaagcgggacgcagcgtgtcacattctcatcaacttagggtggacctatagtcctcagaagggctggaagaagccggagccgctgcataattggaaagagttcgataaggactcaatgacacacattaaggctggtgattgggtacttatcgacgcactggtcccgacactaggtggtgtcgttaagtgtggtgcattcgtgcgggtggtaagtggcacccgagtgattgtgtcgccgattattggtgtaagcaccagaggcgctcacgtttccgacatccgtgttgagcttacgcctcgaagctgtaccgtgactaccatgaaggcggcggcagagcttccgtttcaacgataaccattaaggagggcatcaatgctcgtatccgatatcgaagcagacaaccttttagaacacgtaacgcagttccactgtggggtcatctacgactacagtacggaagagtacgtatcgtatcgcccttgggacttctcatcgtatctcgatgcgttagaagctgaggtggctcgtggtggacttatcgccttccacaacggtcacaagtacgatgccccggcgttgaccaaactggctaagctacagttaaaccgagagtttcacctgccgcgcgagaacgtgatagacaccttggtcctcagtcgtttgcagtacgcgaacattaaggataccgatatgggcctgctgcgttccggtaagttacccggtaagcgattcgggtcacacgctctggaagcatggggctaccgtctcggtgagatgaagggtgagtacaaggatgacttcaagaaactccttgaagaacaaggcgaggagtacactccgggtctcgaatggaagtccttcaacgaaccgatgatggcgtacaacgttcaagacgttgtggtcaccaaggctctccttgagaaactcctgagtgacaagcactacttccctcctgaggatggttgcggggataactggtggatgcacgacgctgtgacattctggaagtattcctgtgaggccgtatggctggaacaccgggctgcttggctactcgctaagcaggaacgcaacggattcccgtttgacacgaaggccattgaggcactttacgttgaactggcgggtcgtcgttctgaactccttcagcaacttactgatacctttgggacttggtatcagccgaaaggtggcaccgaaccattcctccacccgcgcaccgggaagcctctccataagtatccgagagtgaagaccccaaagcagggtggtgtctacaagaagccgaagaacaaagcgcaacgcgagggtctggaaccgtgtgagctcgatacgagagactacatggctggcgctccgtacacaccagtagagcacgttgtgttcaacccaagtagccgtgaccacattgcactgaaacttcaagaggccggatgggtacctacggaatttaccgaaaagggagcacctaaggttgacgatgaggtcctcgaacatgttcgtgtagatgaccctgagaagcagaagtgtatcgacctcattaaagagtacctgatgattcagaagcgaatcggtcaggcggctgagggagacaaggcgtggctacgttacgttcaagaggatggtaaaatccatggaagtgttaaccctaatggtgcagttacagggcgagcaacgcatagcttccctaaccttggtcaagttccgggcgttcgttcgccgtatggtgagccttgtcgagcagcgttcggcgctgagcatcacttggacggacttaccggacagccttgggttcaagcaggcatcgacgccagcggactcgaactccgttgtctggcacacttcatgtctaagtacgacgacggggcttatgcggatgtcattctcaacggtgatatccacacagtcaaccaaacggcggctgagttgccaacacgtgataacgccaagacattcatctacggtttcctctatggtgctggagacgaaaagattggacagattgtgggagcaggtaaggaacgcggaaaggagctcaagaagaaattccttgagaacaccccagcaatcgcagcgttgcgcgaaggaatccagcagaccctcgttgagtcatctcggtgggttgccggagagcagcaagtcaaatggaaacgacgttggattaagggactggatggaagaaaggtacacgtacggtcaccacatgccgcgctcaacacgttgcttcagtcagcgggtgcgctcatttgtaagctgtggattgtcgagactgaagagttgcttcttaaagcaggattgaagcacggatgggatggcgacttcgcctacatggcgtgggttcacgatgaaatacaagtggcctgccggaccccagagattgcacagcaggtgattgacatagcgcagcaggctatgcgtaacgttggagaccactttaagttccgttgccgtctggatacagaaggtaagatgggtccaaactgggccgtatgtcactaataatacaggagatttaacatggctattaccaagcgttgtatcgtaagtttcgacatgaagttcgtggcttcgagtgaggatgtggaagggtacaccaagcgtatgctgagcgtgtcccgtaagattgctaacggggagaaggtatccggcatcgagctggaacttgcacgtgttgctgccaccgagggcatcgaagcgtccatcgagttgtccatgaagtctgccattgttggccgactgaaggatgagctacgagagcctcaggtgtcgtgtggtaacttccgagtggggttcaagcaatgagtgagtacctcaaagttctggcggccctcaagggctgccctaaatccttccagtcgaactacgtgcgtaacaacgctgcgttagtcgctgaggctgcgagccgtggtcacatttcgtgcctgaccatgagtggtcgtaatggtggtgcttgggaaattacaagtgccggagtgaaattccttaagacccatggaggttgtttatgagtaagttatcggctaatgtaaaggaatacgttaaggagcttggtaggcgttacaccgagcaccgtaagtattcccagttcttccttacgatttccctgaaggttaccgagagtgatgctaagtgcgaagaggagcttcgcccttacgttggtaaagagattgtcgctaccggaatgtgggacgatacttggggcgatgagattcacgactggcgagtgttctctatagagacctcagaggaagacactgaggtacgctcagagttccgtgagctactttcacacctcaacgctgaggagaacagtatggcccttgacttccttgagaagcaccttaagccgaaactggtggaggagcgcgtggaggtttaccatgagtaagcacactttgttatccttcagtgacttccgggcaacccagcctaagtccaaaggcgtccttgtgatggatggcgactggatggtctttcaggccatgagtgctgctgagtttgatgcttcgtgggaagaggagatttggcatcgttgctgtgaccacgctaaggcttggggtatcctccagcagtccattgaatcctacaagtcccgtaaaaaggcttggaagaatgctgacgtagtcctagcgttcaccgaccgtgtaaactggcgcaagctgttggttgacccaacgtacaaaaagaatcgcgccgtctctaagaagcctgtgggttactttgagttccttgcgcgagtatgggatgagtacacaagcatccttgagccgcgactggagggagatgacgtgatgggaatcatcgggtctaaccctctggtctacggttacgacaaggctgtccttgtgtcctgcgataaggacttcaagaccatccccgattgtgacttcctgtggtgcactactggtaacatcctcgtgcagacccaagagaccgctgactggtggcatgcataccagatggttaagggcgacatgacggatggttacggcggaattccgggctggggtgataccgctgaaggtttcctcaacgaacctcacattgtggagcctgtggtgtccgtactgaagtccggtaagaacaagggccaagaggttaccaaatgggtgaaacgttcccctgagcccggagagacgctctgggattgcattaagtccatcggtgcgaaagccgggatagaacctgaggacatcattaagcagggccagatggctcgcatcctgaggtctgacgagtacaacattgaaacaggagagattactttatgggacccgtctctgtcggagaagctgctgctgtcatccttatcgtaggaccgattgcgcggttactgtgggtgctggcgtaccatagccgtaagtcactgaaagacaacacgaagtagtatgttcgagtgtacaccttccgctaccgtgtgagctaacgactcactataggggagatgtatactctatagatattactttaagattactttaagaggagcatcttatgttacgagaaatcacgaatactctggataacccttcagacatcccagctatctctaagtcggctatcagctacctccagtctcgctttaacgcagactacgtggcggcatccggtgagatggacactctgaagactaagggttacagcgaggcggtaatccttgggttcatcatgggtctgcaacacgctacgtccgttctggatgacatggagtacattcgtagtttacctaaagaggagtgattattatgtgcttcagcccaaagatgaaagcgccaaaggttgacaccgctcaggtagtcccaccagctccactaacggaacagccaactggcgtggtcttcggtggaaacgatgaggacaactcagcggataccacagcgaacgctactggtcgcaagagtgtcaccgttaagaaagacccagcgaaggccacgagtgccactaagtccatcaccaacaaggcgttcaaccaatgattctacaaagagagcaatcaaacgactttacgcgagagttagccaccctgtggacttgggagcgcctgaagacacctaaggggttctgcacgttcgacgaatgggctgaccacgtaaacagcgtcatggacgcctcaggttacagtgagttcatacttagggacccttctaggaacccaagagcggtggcctacttcgcgtgtcaggtcggtcagtgcatccaccatcacggtgacgtgcttgacgttggcttcatggtcatcaacccatccttcaagggcactcgaagtgtctggagggctatcttagcgttagcacgtctgagaggttgctcatggattgcccgtaagcagcaccagccagatgggtccattaaaactatttactcggaggtgaaaatctaatgggtagtatcgtaaagaaaatcactaaggcggctaataagctgactggtggcttgctcggtaaagaccctgcgatgccacaggcagtagccccagagcctgtcgctccggccccggtggaagcacctaaggtcgaacaagtagaggacaactcgactgacactgagtcagacaagaagcgtgtccgggcgactggcaagaagtctcttagcgtatcccgtaactctggcgctggtatcaacgtatgattggttatggggagggctaatagatggctactgtaaaacgtacagggttcggtgaggaatccgcaaaggctgtgtacgaccgtttaaagaacgataggcaaccttacgagactcgcgcagagaactgtgcgcagtacacgattccctcactgttccctaaagactccgacaactcctctacggactacacaactccgtggcaggctgtgggagccagagggctaaacaaccttgcgtccaagctgatgctggcgttgttccctatgcaatcgtggatgaagttaacaatcaacgagtaccaagcggaatcccttgcgggtgaccctgaagtgctcactcagattgacaagggtctctcgaaggtcgagcgaatcctgatgaacttcatcgaaaccaacagttaccgtgtgaccatgtttgaggcccttaagcagctcatcgtggcaggtaacgttctgctgtacatcccggagcctgaaggcccgtacaacccactgaagctgttccggttgaactcctacgtggtacagcgagatgcctacgggaatatcttgcagattgtcacgctggaccaaatcgcgttcggtgcgttacctgaagacctccgctcggaagtcgagaagtccgctggcgataagaaaccagacgacctcgtggacgtgtacactcatatctaccttgacgatgactctggagactacctcaagtacgaggaggtcgaagagattgaggtccaaaagtcagacgctagttaccccgcagatgccttaccgtacattccggtcagaatggttcgccttgacggtgaatcttatggtcgttcttatgtcgaagagtatcttggtgacctgcgctcccttgagaacctccaagaggccatcgttaagttcgctatgattagtgccaaggttatcggtctggtcaacccggcaggtatcactcagcctcgacgtctctcaaaggctcagactggtgactacgttccgggccgtaagagcgacattgagttcctccaactggagaagtctcaggactttaccgtagcgaagaacgtgagtgacgccattgaggctcgccttgcgtatgccttcatgttgaactcagcggtccagcgtacaggtgagcgagtgacagccgaagagattcggtacgttgccagtgaacttgaagcgaccttaggcggagtctattcgattctgtcgcaggagctacagttaccgctggttcgtgtactcctcaagcaactccaagccacccagaagattcctgatttacctcaggaagctgtcgagccagctatcagcacaggtctcgaagcaatcggtcgtggtcaggaccttgagaagctcaaccagttcgtacaggcgctcggtatgttgtctccgctgtctcaggacccggatatcaatatggctaacgtcaagctacgtgtggctaacgctattggtatcgacactacaggtatgctgatggacgacgacatgaagaaccagaagatgggccaagaggctgtccgcgaaggcgctatggcagcagctcaaagtgctggtgcaggtatgggctcagcggctacttcaagtcctgaagctatgcagggagcggctgaccaagtgcaggcagcagcaggttaatagcaaacgactcactatagggagagatggaacattacgtttggtggttgccaatttacgattggacatccggctgccgagcttggcgtaatggtgccctttagtctataacaacatggagaacaatatgtccggtgaatctaacgctgacgtttatgcgtcttttggtgtgaactctgctgtcgtgactggaggtaatccggtagagcacgagcagaacatggttgcgttgaacgtagagactcgtgacggtgatgacctgattgaagctcacgatgagcaacctgaagacctgtacaatatcgaggacaagttcgctgaagaacaagacccgaaccgtatgcaggtccgtatcggcgaagaggcttcagaggatgccaacgctgatgaagcggttgaagagaacgcgggtgaggaagaactgagcgaagacggcgagactcctgaagagttcgtgccgcttggtgatgcccccgcagacctgacggaagtcactcagcaaatcacagagcatgagcagggattccaagagatggtggcggacgccatcaaccgagggatgtctgaagaggacctagcgactatcgaagcggaatacgctggtgatggtattagcgatgcgtcctacgagaagttgaaagccattggttactctaaggcgttcgttgattcgtacatgcgtggtcaagaggcactggtaaaccagtatgtcgctcaggccaaagcgtacgcaggcggtgaggagcgattcaacgctctccatgcgcaccttaagtcaaccaacccagaggccgcaagtgcccttgagactgctttcggcaaccgcgatttgggtaccatgaaggcaatcatcaatctggctggctcctcgttcaccaagaagttcggcaaacctgccgagcgttcggtgactaaacgtgccattccggtgaaacctcaggtcaccaaagcggaaggcttccagacccgtgacgaaatgattaaggcaatgtccgatagtcgttaccgttcggatgctgcgtaccgccgtgaagtcgaacagaaggtaatcaattcggccttctaagagcaaacgactcactatagggagaccgcacaatctgacaaggagcgaaagcatctccctttagttacacattgagaaccaactcgattcaagtagtaacacccactttatctttaattcatgaataggagatttacattatggcagatatgaaaggcggtcagcagattggtactaaccaaggtaaaggtcagagcgcagcagacaaactggcgttgttccttaaagtgttcggtggtgaagtcctgaccgcgttcgctcgtacctctgtgaccactaaccgtcacatgattcgttccatcgctaacggtaagtccgcgcagttcccggttcttggccgcaccaaagcagcctatctgcaaccgggccagtctctggatgacaaacgtaaagacatcaagcacaccgagaagaccatcaacattgacggcctgctgactgctgacgttctgatttacgatatcgaagacgcaatgaaccactacgacgttcgtgcagagtacaccgctcagttgggtgaatctctggcgatggcggctgatggtgctgtactggctgagctggctggtctggttaacctgccgtccaccactgacgagaacattgcgggtctgggtaagccttccctgctgaccctgcctactatcaccgcagaaacctctgtgactgacgttgagaagtacggtcaggaaatcattgcgatgctgactcaggcacgtgctaagttcactaagaactacgtcccggcttctgaccgcaccttctactgcaccccggaagcgtactctgcgattctggctgcactgatgccgaacgctgcaaactatgcggctctgattgaccctgagcgtggttctatccgtaacgtcatgggcttcgaagtcgttgaggttccgcacctgactgctggcggtgctggtgatgaccgtgaagacgaaaccactaaccagaagcactccttcccggcaactggtaacgtcaacgttggcaacgtggtcggtgtgttccaacatcgttctgctgttggtaccgttaagctgaaagaccttgcgctggagcgagctcgtcgtcctgaatatcaggctgaccagattatcgccaagtacgctatgggtcacggtcagctccgtccggaagctgctggtgctgtagttttcaaagcagcggcttaagagtagcagcctttagtgcgaccgtagagagtgaagtggagccgaccccagaggtagccgccgaagtagctctcacgcctcaacagaaggccgcaattactcgtgctcgcaacaaggcacttaagtcgtaacgtttagccaaaccccatggggccttcgggtcttgtggggttttttgcttctttaaggagataccaaatgtctaaccttccgtttaccggggaactcgacgccattaacgaaatgttagcggctatcggggaagcccctgttgaaacactggatgacgagaataacgtagacgtggctaacgctcgcagaatcctcaataagattaaccgacagattcaatcgagagtctggacgttcaacctagaggagggtgcaacgttgacacctgatgtcgccactaagttaattccgtacagtccagactatctgtccctgatgaacaacggcggggccagcgtatacgttaaccgccaaggttgggtgtacgataagtcagctaacagtgaccagttcgatggtcctatcgccgtggacatcgtgagactcaaagattacaacgagatgcctgaatgcttccgctcgtggattgtcgctcgggcaagccgccagtttaactctcggttcttcggggctgaggatgttgcacaggacctcgcagaagaagaacaggatgcggcacagcgttgctttgagtacgagctggactacggcaagtataacatgctggacggtgacgccttcgttggtggtctactgagccgataatacagataaggaggacctaatggccctagtaagtcaaagcattaagaatcttaagggtggcatcagtcaacagcctgacatccttagatacccagaccaaggggccgcccaagtcaacgggtggtcctccgagactaatggtctacagaagcgtgtccctacgaccttcattaagggtctcggtggtcaagggttcttcgggccagcgccactggtgcacctgattaaccgagacgagaatgagcgatattacgctgtgttcaccggggatagaatccgtgtgttcgagctggacggtaccgagcgtcaggtccgagggtccttcgagtacgtcacaacgaacaacccaagggatgaccttcggatgattacggttgctgactacaccttcatcgtgaacaagtccgtggaggtccgtgagaaccgtggagacttatccacaggtggcaacttcaaggacaacaaaacggcactcattaacgtgcgcggtggtcagtacggtaagctactcaaggtcaacctcaacggtacttgggtggagcaccaattgcctgacggctcagacccgaagcagtcccctcagactgatgcccagaacattgcggctgcactgcgtgataaacttgcgactgcgttcccatcgtggacattcagtgttggtacggggttcgtgtacattgaggcccctgtagacgctaccattgggaccctacagaccgctgacggttacgctgaccagttaatcagcccggtaactcactacgtccagacgttcgctaagctacctctgaatgcgcctgacggttatatcgttaagattgtcggggacacctcaaagactgccgaccagtattacgttaagtacgacgaaaagcagaaggtctggaaggagactatcgggtggaacgtaccgatgatgattgtttacgagtccatgccctatacgttggtccgagcggctgacggcgagtttgacttcggggttcacacttgggacccacgcaaggcaggcgatgaggataccagtccgatgccatcattcgttggcggtaagattaccgacgtattcttctggaggaaccgtttaggattccttagtggtgagaacgtggtgttgtcccgtacagggaaatacttcgacttcttcccaccgtctgtggctaacctgagcgacgatgacccgattgacgtgtccatcagtcataaccgtgtgtcaatccttaagtacgccgtaccattctctgaggagctcctgctgtggtctgacgaggctcagttcgtcatgaacgcttccggggtactctctgcgaagtcagtagagttgaacctgacgactcagttcgatgttcaggatggagcgagaccttatggcatcggtaggaatatctacttcagcgccaagcgagcaacctatagctcaatcaatcggtactacgctgtaggagatgtgagtgaggtgaagaacgccgaggacatcacggcccacgtccctgagtacatccctaacggggtcttcagtatcaacgggtctggcgtggagaactacgcctcagtgttgaccacaggcgcaaagaaccgaatatacctctataagttcctctacgttgatgagcagattgcgcagcgctcttggagccactgggagttccctaaggagaccgaggtgttggcggctgactgtatcggctcaacgatgcacattatgatgcgtaatgggaccgactgctggctggctaacgctgagttcaccgaggacactctggacgttgacggtgagccttaccgggtacacgtggacattaagaagtcctacacgattcctgagggcaagttcaacatggacaccaacctgactaccctgagccttcgcgagctgtacgatatggacttccctgatgggtggaccatgtcaatcgtagagcctgacggtagactcacagagtacgtcaccgggcaacctattgagtacgttggggacctgactggcgttaaggtgaccgtagggtttaactacacgttcctttacgagttctctaagttgctcattaagaagaccgacccggatggttccacctctaccgaggacaatggacgcctccagttgcgtagagcttgggtcaactacaaggactccggtcagttcttcgtgaaggtcaacaacggtagccgcgagtttagctataacgttggttacggtaaggtagggaccactggtgtcaccttaggtaaacctgtattgaaggacgggcagtaccgcttcccgattgcaggaaacgctctgcgtaacgctgtgaccattgagtcttcctctccgacccctttaagtatcattggggctggctgggaaggtaactacgctcggaagtcttcgggcatttaataaccaagtccctatggtgagcaaacgactcactatagggaaccaaacgactctgggagggtttcgttatgttcattaggaaaactgtaagtaatgactttgagttattcaccccggcctaccatgacctacttgaagcgaaggctatggggattgaaccatcgttccctgaggcgtccgagtgtgtcacgttagaccacggtgggttccctctggcgataggtggtaatcatggagaccaagtgtggttcgtaacgagtgaccaagtgtggcgactcgacagagcgctgaaggtcagattccgtaggtgtatatgcgggtatcgcgatgcaatgctcacggtctaccctacgctgtggaacttcgtttacattaataacactccacacataaggttccttaaggccatcggggcggtattccatgaggagtacactcaggatggtaaattccaactattcacaatcactaggaggtaactatgtgctggatggtagcgattccgatggctattgccgccgctgggtccctcatgaagtccaactctgagaacaaagctatcggtgctcagaacgatgccatgcgacgtcaatccatggagcagctgaaggcaaccaacatcgccaacgctgatgacacccttaaggcccgagcggctcttgaggacgcttcaagtgaactctcgacccgtaacctcaacaaggtacaggcgatggggacactccgagcagcaatcggcgagtcaggtcttgagggtaactcaatgtcccgcatcagccgggtcaccgagggtcaatacattcgtgaagccaacagcgtgaccgagagctacaaccgagactacgcgagcatcttcgctggtcaggtaggccgtaccgagtccaccaagtctcagattgaggcgaacaacaaaggcgaactcaaaggtaagtctggtatcgaaacagcacttgatgcgggactgtctgctggcgctgcgtgggctggtagctcagcttcaggtggcctgttagccaagggaggtaagtaatggcaagtaaagtttatagtgctttaggtaacatggcgactcccggaatgtctcgactgagaggcttccaagggcagggctatcaggtggcttctgtcaaacctgaagacacccgccagtgggatggcatcatgcgattcgctgagctggctggtgacgtttaccaaaaggtagaccagaagaacaaagacaaggccgatgagcggtccaacgagattatccgtaagttgactcctgagcaacgtagagaggccattaagaatgggaccctactgtatcaggatgacccttacgcaatgcaagcgttacgctttaagactggtcgtaatgcggccttccagattgacgatgacgtcatgcagaaggttcgcgagggtcagttccgtagtcgccaagagctcgacgaatatcgtcactcccggctacaagaaggtgccaagaagttcgctgaagagttcggccttaacgaggctgatgaagatttccagcgtggcttcaacgataacatcaccgagcgtaacatctctctatatggtacccacgattcgttcctgagtgaccaagctcagaagggtgccttggtgaattccaaggtggaacttaacggtgtcctgaatgacccggacatcctcaggtctcctgatggtgccgagttcttccagaagtacatcgacaatggtcgtatcactggttccattccgtcagactctcaggtctcacagttaatctctgcgtcccttcaggacgttgtacagcgtgagggcggcgctcagttcctgatgaaccttgaagataagaaggtgacccttaacgggaccaccagtaccttcagggaacttctgggagacgagcagtggaacatgatgaaggtgaatgctcagcataccgagttcaccctcaatgctaagcgattcgagaagttctccttgggtatcaacaatgcgttgaaccaagctgacccgtcgaagggctgggagcaacttcaggcaatcaaggagcaactcgacgaaatccaaccgggcgaggagatgacccccgagcgccagcagttaatcaacgctcagcagcagctccagaacacgttcgctcagaagtcagcagctaccgctaaggaactggacaaacagcagaagtccatgaacaaacaacaagttatcgagcagcaattcaacaagcgcctcgctggggaatacgtctccactgcgtttgctgatatgccaaccaacgagaacactggtgagttcacccatagcgatatggtcaactttgcgaacaacaagttgcagcagattgagcagatggacctgacggatgaacagaaggacgccatgaagttgaagtaccttcgggctgactctaaggacggtgccttccgtaccgctgtgggacaaatggtctctgacgctggtaacgaatgggccgctgcgattatcaacgggaaactccctgagaacaccgtagcgatggacaacctgcgacgtatgcgcaataccgaccctgaccttgtggctgcgctgtaccctgacaaggctgacctcttcgtgaccatggacatgatggataagatgggagtcaaccctcagatgctcattgatggcgagaagtaccgccgtacgatgaccaaagagatgcagtatgaggacgataagtcttgggcttccctgaagaacaactctgagtcccctgagctctcccggttgccgtcgagtctggacgctatggcccgtaaggtatacgacgctgtgaagtatcagactggtaactccgacatggctatgcagcaggtcgataagttcctcaaggactccaccacgactttcacctcggatgacgtggacggtagcaccatcggtgttctgcctaagagttcccttcaggtgaccgatgaccctaagagctgggagcaaggtcgtgacattctggacgctgcccgtaagggtatcattcagaccaacccttggattaccaataagcaactgactattgtccaatctggcaacgggttccgcatgattgataccactggtaacgtcaatatctactacgataacgacatccttcgccgtgagtatcagcgaaccactcaagctgccgagcagaaggcacgtgatgaggccattaagaacgccaataagcgagcacctatcgcagccgctacgagggcccgagaggccgctggtgagcgtgtgagagccaagaagaagaccgtaccgaagttcatctacggaggcggtgagtaaccaacagaaaccataaggaggccctgtggctaaatacgataagtcaattccaagcgcctatgacgctgtgttccaacaagcggctgatgaggccggggtctcctatgacctgctgcgtaaagtagccttcaatgaatcttcattcaaccctaaggccgtctctaagactggccctatgggcatcatgcagttcaccaaagctaccgctaaggccatgggtcttaacgttactggtgacgataaggatgaccgttacaacccggcgctggcaatcccggctgctgctaagcaccttgcgtctctcgttaataagttcaacggggatgaactcaaagccgccttagcgtacaaccaaggcgaaggccctgctggtgctccacagctagaagcatatgaccgtggggacttctccgcgattagccctgaaggtgtgggctacatgcgcaagctgacagacgtagctcgcagtgaccgtaaaggactccttgaggagttcgggggcatcaccccaaaggctaaaggtatccccgctgaggacgcctttgcgggtctccaagcgcagtctaaggtaggcgataccttacctcagtccaccgggttctccattaaggggaccgagcaggaggctcctaacgagccctttgctaagactttctgggagacccacggtactactctggatgagtacaatcagcgctctacgttcttcgggattggcgatgccaccagtgcagagttacagaactcagcgttgggcgttgcgttccgagcggcccgagtggatgactcatacgatgtcttcaaggacaccatgacgccaaccaaatggaacagcaccacatggtcacaggaagaccttgagcgcatccgtaacgaagtgaagaacccgagctacatcaacgtagtcactggcggttcccctgagaatctggatgctctcatcaagatggctaacgagaactatgaggctgaccgtaaggctggtgacgctggacttggtgccaagctgactgctggtatcatcggtgctggtgttgacccactgagctacgttccgatggttggtgtagccgggaagggacttaaggttgtcaacaaggctcttatcgtcggtacccaatcggcgggactaaacgtagtctctgaggggttccgtacgtccatcgcaggtggtgaagcccactacgcggatgctgccttaggtggccttatgttcggttccggcatgtctgtccttggtgacgctatcgctaagggtctcggtcggactgactacaagaatgactttgcgggtcctgcgatgcgcttagaggcccgagagtctaacttcaacgctggcggtgctgacccgacgctgcaccctgtggataacttagagttcaccgggagccgtggggccgtacagttcgctgagcacccagcagaggaaggcgctgtggtcctgccgtcaggtttaatcctgagcgagaccaatccggtcaacccgaagctgcgcaatgagttcgagcagattgaccctgagcgagcgtccaaaggtatctctcttggtgggttcactgagattggactgaagactctacgctcagaggacgctgaggtgcgtggcttagcgactgaccttgtgcgttctccgactggcatggagggaggctctaacggtaagtttggtgctacagcatccgatgttcacgagcgtctccacaacactgaccagcgcatgtacaatcaactctatgacgctatgcgtaaagccatggatgacccagagttctccactggaggccagaagctgtcacgtgaaggaatccgtcaggaaatctatcgacgtgccgctatggctatcgagcgacctgagctacagagtggactgaccaaaggtgaacgtaaggtgatggacctgatgaaggaacactttgataccaagcgtgaactgatggagaaccccggcatgttcggtcgcatggacgccaccagcatcttccccggaagtcgccataagggtacctacgttcctaacgtgtacgaccgggcaaccaagcagatgttcatccagcagtacggcgaggagggtcttcagaacgccattgcgactagctggctgacctcttatcgttcccgtcctgaagtcaaggcgagagtcgatgagtacctgtcggagcttaacggtggcgctgaggtgacccctgagatggtccagaaacacgctatggataaggcgtatggtattagccacaccgaccagttcaatgcgtccagtgtcattgacgacaacattacgggccttgttggtatcgagaataactcattccttgaatcacgtaacttgttcgacagcgacatgcctatcactctgcctgacggtcagacgttctctgtgaacgacctaagggattacgatatgttccgcatcatgccagcttatgaccgacgcattaacggtgacattgcaatcatggcaggtaccgggaagaccaccaaggacctcaaggatgccatcatggcactcgataagaagtccgaaggtaacggcaagctcaagggtgaagtggaggcactgaaggacaccgttaagattcttacagggcgagctcgacgcaacaacgatacggtattcgatacagcactgcgctcattgaatgacctttcgttcttcgctaagaacgcctacatgggcccacagaacctgacggaaatctctgggatgctcgctaagggcaacgttggggccatgctgaataacatcccgattcttaacgacatggttaagcaaggcggtatgaagggttccgaaatcaaggaactccacggtgttctgttcggtcgtgagtttgaccagcttgttcgtcccggtcgtgcggatatcatccagcgtcttcgtgaggcttccgatacgtctgccggagtggctaacgttgtgggtaccattaagtttggtacgcaggaactggcagcccgttctccgtggaccaaggtcctcaatggtaccgctaactacattctggacactgcccgtcagggtgtgcttggtgatgtagctaacgcagcgctcttagggaaatccgctaagttcggtaaggacaacttcctgaagtctgcgagtatctctaaggaacagtgggctggcattcagcaactcttcaaggaacatgctaaggtcaacgaggatggttctttcagcatcatcgacaagaagaaattctctcaggacccacgcgctatggacctctggcggttagccgataaggttgccgatgagaccatgctgcgtccacacaaggtttccaatcaggactccaaggcgtatggtgcaggcgtgaatatggcgatgcagtttaagaactttgtcgtcaagtcactcaacggtaagttcgtccggtctttctatgaggccacgaagaacaaccgagcgattgaccaagctctcacccacgccatctctctgggtctcgctgggacttactttgcgatgcaggcccacgtgaaagctctgggtctacaggaagaccaacgtaaggactacctgaagagagcgctgaacccgaccatgctggcctacgcagcagtatctcgaagctcccacttaggggctcctctaggtatcgctacgatggtaggtggtgccctcgggtaccaggatgctcagatgctccgttccaccattctgcctaaaggtgtcgaagagaaacgtaaaggaaccaacgaggtcaaatctcgggatgtcctagcgaatcttggtggcaaccttgcagcacaggtgccagctctgggatacgttgcgtcagttgcgtctaccgtgatgaacgctacaggtgtgctgacagctccgaacaagcctaccgaaagggacttcatgactggcctgatgaatgccaccagagagattgtacctaacgacccactcacccagcagctcatcatgaaaatctatgaggagcagggtgtacgcatcaaggagcccgctaagcagggctaacgactcactatagggagagacctaataagtcctcccttaaagtctaactataaggagaaacaatatggcatcacctacggtcgttcggactgttaagcgttatcctcttaacggtagcattcgagacttcgatatctcgtttgactatctggcccgtaagttcgttgtggtctccctagtggatacctcaggtacactggagcgccgccaactggtcaacgtgacagactaccgcttcaccacaaagaactccatccagaccactgtggcgcatggtgctgagggttacgatgagattgagattcgccgtgtcacctctactacagagcgtgtggtggacttcgctgatggttcggtacttcgtgctcaggacctcaatgctgctcaggtacaggcgatgcacattgcagaggaaggtcgtgaccaagccctgctgtctatctctgtgaccgactcggggcaacttgacgcccacggtatgcaaatcattaacgtggctccggggacttctccgagtgacgccatcaacaaggaccaactggatactaccttaggtgaaatcggtggggtacttgatgaggttgaagaaaccaagcagtggattaaggactatatcgataacttcgtgaacgatacagcgaaccttaagaacgtcctttgggtctacaacggtggtattgctgtcggtggtgagaccgagattacggtaaccaaggaaggaagcattgtgaccatccctgcgctgtacatcaacggtgaccgtcaagagcgtggctggcagttcgactattcgtccgtcgataagaagattatcctcagcaaaccgctcaagtctggtgacttcgtggcgtgtctgaccgctgaaggttccactccaatcatggacctgctggcgtcaactgaaggtgcttccaacattgggaccactaacggtaagactgtgcaggagcgcatcgacgagctgactcaacgtattgactctgtgaccaacttgcagaccattaacgtgctgtctcatggtgctgttggtgatggcgttcacgatgactacccggcgttccagaaggctctactcaaagctcacgagctgggcggtgctgtggttgagattcctactccgaaggtggagtggcgtatcggcttcccgctgtacctcttcagtaacacctcggtgaaaggctctggtgttaactgtcgcatcaacttcgtggacccgctgtattcccgcaagtcccgctctgggttcgtcattgggtctggatatgagcagaaccgtgacaaggccattcagtgtctgcgtgacggcacttgggcgactaccgggtccgtagtggatacctcatttgtagagccagcacgtggcgagtacatccgggaccatctggaccgcgtacagtcagccaactgctcaatctctgatgtctaccttgtggcaacctatccgaacggtacgacccttaagggcggctatgcggtgtctggtgccaacgcgattgacagtgtggtctacaacgtgtgggctgaaggtttcactgagattatcaacttcggttctgacgtacctccggcgactcctagctgtcacaacctccacgcttgggacatcgtgagcgttaaacctaacgactacgagacgtactactctgctggattcattgcgaactccaccatgtgcaccattcgtggctttaagcagctcaagccgattgctgatggttctcctcatggttccggggcatccctgaactacaccgaggactgtggattctatgacttccacatcccgagtctgggacgtacggcttcctctgagggtatcctcgtgaacaactctaagggcgctgtggtccataacgtgaccattggtaacgctaagactggcgtagcggaatactacacgactggtgctggtatcttctacgataggacccgtcctaacgtgttctctaatatccacgctaacaactgtgataacgctgtggccctgcgctctaagttctccgtatggaaggacattacgcagaccaactgtacctatcacgtgtactttgggaccaccaacgctcaggcgtgtgacgttaagttcgtaccggactccttaggtttcggtaacaacgttgacggtcttgcgcgtatccgtgacaacaaagtggctggttatcgggaacgtagcgtgtaccttcgctctattggttaccttgtggaagacaaagcgtctctgcgtagctgggaccttaatcgcaccatgaagctagaggatggcgtagggtgtcacattctgtatccggtacctccgtacatgcgagccatcttgagcgttaaccagaagttcacctttgaggtaaactcgcaggccaagggctccaaggtgacggtgcaggttcgacgtctggcaaccttcagtggcaactctaacgagtcccctgtgattgagtttgagaactctcgtacagcgtctgtgaacagcgttcaggatactgacgtccagaccaacgcgcctcgactggtggtcaactccccggatgacggcatcccgaactctatggatgtccttgtgaccgtggagaatccagcagttaacatgaacatcaaagaggcacgtatcgtgtatctcggcgactaacaataaggagactaaatgttactcaatgaactgaaccaacctcgtggggccactattggcctccttaacgatggtcgtactgtgcaggaagcaatcgacgagattgagactatcaagacccgtaacgtggaccctgagcgattccgtgagactatgacgtcaagtgacgacgatgtattcgctaagatgttcgcttggttagccactcagactgacgtagtggggacctcagagtcctcctacatctcagctctgccacgcatgattgacctgtctgggcgtacctatacgctcaccaaagttcaccaactggacggcaacttcgggattcagaatggtaccatcttcatgaaggaccaaggggaaatccttatgggtctggacgctggtaccaagactcgtcgtcacttccttaagtatgtacattttgagtacattggggacgctgaccgtacacagtctctggtgaccatggctcgatgcttcaactctgtggtgctgttctgtaacttcattgcaggtggtgatactgcccgtaatcgcactccgcgtactcgctatggcctgttcgctggctctacccgttgctggggcttccagttaatcggtggtgagtattacggtggcgactgtgcgttacgtgtaggccgcgctaatgaccacactgggttgaccattcgtcccggtacggttcaccactctcgcgtcatcaacatgatgctatgtaaccccgctggtgccgaagtgtctggctgtaacattgaacacgcagacaacggtgcgattggcttagggattacctcaggtaccaacacctccggtaacgcagcccacggtgttcgtatcaacggtgtgtacttctacaacaacggtaacggctctagcggctccaacgttgctccagccaacatcctcatcgggaaggacattccgggaactgagggttgggaccgtgaaggtcttccgattacctccagtaagaacactgcgcacagtattacggtatctgagtgctacatcgttagcccgaacacccagaacgcttggcaggtgaacgccctctacggtgtaaactttgtggataacaaggtgggccttaaaggcgacgctacgattcacggtgtctacgatgggacctgtgccaactgctggacttacggtaaccgtgaccaaggcggtaagaccttccagttctcctctacggcgaccaaccagattctgactacccgtaagggcaagtggactccgaagctcatcggtgagacctccgcaggtaacaccaccctgagtgctggtggcggtgcgtactctctggataacgggatggtgaccgtaacgtgtttcgccgttgtgggtgaacgtgatgacgccatgcagggtaacatcaacattaagttgccgtttgcgtgtgaggaccagcagcgtggtggtaacggaatctccctgacgaacgtcccggatgtttccaacccggtgggcagtgttatcgttattggtgacacggctcgaatcatgctgggctctgcccgactgcaacacaccaacgttactggtggtaccgcgattcacttcagcgtttcctacccggtagacgtgaaagtataaggaggaccgatgctgtctttagacttcaacaacgaggtcgtgaaggcagctcctattgtggggacaggtgtagccgatggtgctgcccatctcttctgggggcttagccttaatgagtggttctatgtagccgctattgcctacacagtggctcagattggtgccaaggtagtgcagaccattatcgactggaagaaatcgaataaggagggttaagatggacttgaagaagttccttgagatgctcgatacgaacatggcgcagcagatgcttgctgaccttgctatgccggagaagtgtacgccacagctctacaacgcaatcggcaaactcttggaccgccataagttccaaatctctaagattcaacctgacgtcaacatccttggtggactggctgactctctggaggagtataataagcgtgtaagtcccgatggtctatcggatgacgacatctacacgattcagtaacatactcaaggtactactacatgtggtgcctttatggatgttattgcgctacgcgaggcgtccctacgtgaaatctacgaaacagcgggaggcattatgctggaattttcaaagagaatcgtcccgtatcttgtggttatcatggtgttcgccttcgggtggcactttgggtcacaatctatggacggcaagtggaaggaggtagtacacaatgagtatgtacagaaagttgaagctacagcggctactagcaaagcggtcgcagcgattagcgccaagtaccaagcggacctcgaagggcttgaaggcagcactgataggattattgatgatttgcgtaagcgcaaccagcgcctgcaagtcctcatcaagcctaccaccggaaccccaacaggtgacggtagatgcatcgttgatggtccagtcgaactacacgaagcaacttctcgacgtcttgtcgaaataacgcagaaggccgacctaaaggagcgagcgcttcaagacacaatcagaaaactacaaggagggactaaatgagcgactcgcagaatgcgcgtaacgctctcattgtggcacaactgaagggtgactttgtcgcctttctgtttgtcctttggaaagcgttgaacctaccgccacctaccaagtgtcagattgacatggctaaatgcctcgctgacccgagtaacaagaagtttatccttcaggctttccgtggtatcgggaagtcattcatcacgtgtgcgttcgttgtgtggaccctgtggaaagaccctcagttaaagattctgattgtctctgcatccaaggaacgtgctgacgctaactccatcttcatcaagaacatcatcgacctgctaccgttcctcgccgagcttaagcctcgacaggggcagcgtgactctgtgattagctttgatgttggccctgcccgacctgaccactctccttcggttaaatccgtaggtatcactggtcagttaactggtagtcgtgccgatatcatcattgcggatgacgttgaggtacccggtaactccgccactcagtcggcccgtgagaagctctggacgctggtccaagagttcgccgcactgttgaaacctctggacacctctcgtgttatctatctgggaacccctcagaccgagatgaccctgtaccgagagcttgaggaaaaccgtggctacacgaccatcatttggcctgctcagtacccaaggactcgtgaagaggatatgtattatggtgagcgcatggccccgatgctgcgtgaagagtacaacgagggctttgagattcttgctggtcaacctaccgacccggtacgattcgacagcgaggacctccgagagcgtgagcttgagtacggtaaagctggctacacgttacagttcatgcttaacccgaacctcagtgatgccgagaagtaccctctacgcctccgtgacgctatcgtgtgcggtgttgacagtgagaaggccccgatgcattaccagtggcttccgaaccgtcagaacctcaatgaggagcttcctaacgttggccttaagggtgatgattaccatagctatcataccgcctcaagtaactatgggttgtaccaagaaaagattcttgtggtggacccgagtgggcgaggtaaggatgaaactggttggtgtgtcctgtacacgcttaacggctacatctacctgatggacgctggtggtacccgaggttacgaagagaagtcccttgagttcctcgctaagaaagccaagcagtggggcgtacagaccgttgtgttcgaatctaacttcggtgacggtatgttcggtaaggtattcgccccggtcctcctgaagcaccacaaggcggctctcgaagagattcgtgcgcgtggtcagaaggagctccgcatctgcgatacccttgagcctgtcatggcgagccatcgtctggtcatccgtgatgaggtcattaggagtgactatcagaccgctcgtgacgttgacggtaagcatgccctgaagtacagcctgatgtaccagctcacccgtatgactcgtgagagaggcgctgtggcccacgatgaccgtctggatgccttagcgttgggcgttgagttcctgcgtaaccacatggagctgaacagccaagtagccgagcaagagggtcttctggagttccttgaggagcacatggagaaacctttggttggcggtgagtctatcatggagatgacctacggtggcgtgacgattggctgggaagatgacgacatgagcatcggaacgttcattgaatggtaatgcattaagagtgcataaggaagcattatgaccacggaaggtcacgtttagagaaacctaatgaaatcaggtatttaagcaaacgactcactataggacagagaggggacttcaaacgactcactataggacagagaggggacttaaagcattattatagatactttaagtattcattcagtcacctaaagtgcataagatgaccctagagtatggtgattcttatcatcagataatcacctaactaatagacaacctaaggaggacactcgtgttcaagctactagttacgctactgagacaccgagtgacctataggtttcttctggtacttgctggtgcctgtggtgcttcattggtcactcaacagcaactcagtggattggagactctcctgtgcactgtactcacttgtagcgattagaatcctgctagacccgtaaagactcaacgcagagtgattccgtggatatgattatcatcatacaccactccatcactgtagagtcaatacctaaagtataaccttaagactcacctgtaggctacaggagggtctctacgggtctctcccgaggtctacccttagtaggccgtgtaccattagtggtaccattagaacctcatagagggccttatagaggcctttaagaatataccacaaaagtctgagagcatatctcatagtttaacttcgagtaactccccccggtaccccttaagtatcccattagagagggt

SEQ ID NO: 16 - DNA, 40361 bp, Unknown
  source: /note="Description of Unknown: KP3W-P0202 Bacteriophage sequence"
aaggtgttagggtggcttgtggataactttgggtgttcctgtgggtaactttgggtgttcctgtgttcctatctgttagtcactctcaaggtatcacctaaggtaaccactcaaggactcactataggtgaccattagtcatcaccatttgtagcgctatctattagtatgctgtgagagaccattagcagaccattagatgacacgttgtctcgacctgttgttgctatcgtttagcagtgactgatagtaggtcacaaaggttaatcacttctactctcgtttagcagtctcggagagtgaggagacataaggaataacaggtgagccattactataggtattatccttatgccttgtcaatagtctgtatcatcattcctggtcatcacctctttagagtccacttaaagataatcataaattaatttaaaatagttgttgacaagggttaggaccatagatattataactctcgttccagcaacaacgggacacgaggtgatacctcactgctctttaacaatctggactacagcaaacagtgtctaccgcgagacgggcccgacaggcgacacataagcgtgacctaacattaggtaactcacaaagctcacggtgctcacacacatttagtaagtaactcatggtcattcatatggtctctgactggcattgactcagtcaccctttgagtgaccattacgatactcactaacacctacaatcaataggataaacatcatgatttacactaaagagccagccaacaaagtattcgtattcgttaccgcttatcgtggctatgagtcacacgaagtcaacgagaagatgcttaagggtctcatcaagactatccgcacctatccgggtgcctacggtaatatccgtgatgagaacattacaggctgctttaaggaagctggcatgaccgaggctaccacagagcgcacacttaaggtcgaatgcactgagaagcaagccgctgagttaacgtggttagcgtgtcgtgtgtacaatcaagacgctgtactggtggtatactcacagactcacacagcgcacctgtggtctatcgcaacggtgggcgagtatccgcaatcattcccgatgctcaaagaggatgcgttaggtggtgcgctccaacctgtggatgcgcctaaaggtgaatgctactcgattatcaacggtcaatactgggaggttgtttaatggatgtcacctacggtctcactcagacagacattaagcactatcgctggcttctctcgttaggtaaaccacacgattacctgatgattcacttagcacagacttatcgaacacgaaaggtaatgtatgacaatggcgctcgcagtcataatgattctggggtactcccttatcctcacagtgttcctcagagacttccgcaagggtcttaaggtacacaaagcaacatttagttatatgaagtggggcgtactgcctcgctttaccgtaagggagcgcaatgggcgcttcaaggcaaacaaagtaggtatattctatgtcgcaacgcactaacctgaagaaagcatttaagatagcacgtatggtaatggcctacggtgcatccatgagaaagacaaaacgagctcttatacgtaacgccaacaggctacctgctcgccaacgccaatgggtaatacgtcaggtatacaacgagatttaccgacctgggatggtcccttacgtaatcctgaccgagtcaatgaaagctagaggtgttatatgagcattgataccaaagtgtacgctaacccagacgttaaggactttgtagtccacatactgagcatagacaagtacgtctgggcgtcttcccagatggataccatacttcaaggtgagtacatgcgcaccgcattgttacaccgctggaagcacataggcaacaacctgaagttcaccgactgattaacattaaggacacgtaaccaaatgaatacctctatcgcagcaaacgtaattcactcactggactctaagcagtctctgggaatcctgatgttcgaggagtccttgggcgtagttgagggaatcctcatgaactcaaaggaactggaagctatctctaacaaggtacgcgaggaactcattaagaacgcaatggtagtctacggcgactaatcgccaccctaacccaccacaaggaacacaatatgtctctcatgaactccatcgaacgcaacgatttcagtgacatcgaactcgcggcaatcccttacaacatcctcagcgagcactacggggcggcccttgcgaaagaacagttagcccttgagcatgaagcttatgagttaggcgagcagcgcttccttaagacctttgagcgccagatgaagaacggcgaactggctgacaacgctgctgctaaacctctggtgctcacgctgttgcccaagctggtaactcgtgtgaatgaatggcgtcacgatgaagtatacgaattgaatgatgctggagagtacgtcaagaagggcggtaagaagaaacgcgcgttttacctactggagccactgagcgctgaggccatcgcactggcgaccattaagactatcctctcgtcactaaccgctaccaatgagacatccattcaggccgctgcaagtgcactcggtcgggctcttgaggacgaagcccgtttcggtcgtatccgtgacctcgaagagaagcactacaagaagcacgttaaggaccaattagataagcgtgttggtaccgtgtacaaaaaggcatttcttcaggtggtagaagaggacatgctcagcaagggccttatgggtggtcaggcgtgggaaagctggacaaaacaggattccattcacgctggtgttcgctgcattgagatgctcattgaggccaccggaatggttgagctacagcgccagaatgcaggcatcgcgggtcttgatagcgagagcttacaactcactaaagagtacgctgacctgattaccaaacgcgctggagcactggcgggtatcagcccaatgttccaaccttgtgtagtccctccgaaaccttggacggaaattactggcggtggctactgggcgaatggtcgccgtccactggcgctggtacgtacccacggtaagaaggccctcatgcgctatcaggacgtgtacatgcctgaggtgtacaaggctatcaacattgcgcagtcaacgccttggaagattaaccagaaggtgctgaaggtagccaacgagattgtcaactggaagaactgcccggtcgaggacatcccggcaaccgagcgcaaggaacttccggtcaaacctgaggacatcgacaccaaccctgaagcactgaaggcgtggaagaaagctgcatcgaccatctaccgcaacgataaggctcgcgtgtctcgtcgaatctctatggaattcatgctggcacaggccaataagttcgccaacaagaaggctatttggtttccgtacaatatggactggcgcggacgtgtctatgcggtaccaatgttcaatcctcagggcaatgacctcactaaaggactcctgacgctggctaaaggtaagccgattggtcttgacggcctgtactggctgaagattcacggtgcgaactgtgcaggtgtcgataaggtcccattccctgagcgcatcaagttcattgaagacaaccacgacaacatcatgcaatcagcagccaaccctatcgagttcgattggtgggccaagcaagattcaccgttctgcttcttagcgttctgctttgagtacgcaggtgttgagcatcacggcttgaactacaactgctcgctaccgctggcgttcgatgggtcctgctctgggattcagcacttctccgcgatgcttcgtgatgagattggtggacgtgcggtcaacctgttgccgtctactgaagtacaggacatctatcgcatcgttgccgataaggttaacgagattcttaaggttgacgctgtgaacggtaccgctaacgaagtggaactgattaccgataagaccactggagaaatcaaagagcgcctgaaggtaggtacctcagtgatggcccaagagtggctagcgttcggtgttacccgcaaggtaaccaaacgttccgttatgacactggcctacgggtccaaagagtttggcttccgtcagcaaatccttgacgacactgtgcaacctgcaatcgacaacgggtacactggattcaccaacggtaaccaatcggctggctacatggctaagctgatttggaacgctgtaagtgttaccgtagtggctgctgtagaggctatgaactggctcaagagcgccgctaagctgctggctgctgaggtcaaggacaagaagaccaaagaggtcctacgtgctcgctgtgcggtacattgggtaactcctgatggtttccctgtgtggcaggaataccgcaagccaattcaggtccgcttaaacatgatgtttctcggtcagttccgcttgcagccaaccgttaatactcacaaggattccggtatcgacgcccacaagcaagagtctggtatcgctccgaactttgtgcactcacaggacggcaaccacttaagggcgaccgtagtacacgcccatgagaagtacggtatcgagtcttttgcactcatccatgactcctttggtaccatccctgctgacgcagcgaatctctttaaggcagtccgagagacgatggtcgagacgtacgagtctaacgatgtactcgcagacttctacgaacagttcgcagaccagttgcacgagagccagcttgaagatatgccagagctacctaagactggtaagcttgaccttcaagacatccttaagtcagacttcgcgtttgcttaagtaaatcatgcagttagcgagtcgttggttgaactttgagctaacgactcactattagagaatacttaaagtggtcttaaagattacttagagtgtttattagagagatttaaattaaagatatttaacttaaagataacttaaaggtaaacattatgattatcatgctcagcgcctcactcgtattcgcagcactggccttagctatatcctcaagcaagcttaaagcactaatggaccacaacaagcaactctccgagagggtgctaagagctaaccgagatgtgacctattacaccaagtacgcagagcgtaggaccgaagaggtgagctcattgcagcacaggcttaacgacgtatcgtatcaacgagacgtctccgtcatgaacgccaagaagatgtttgagcacaacattgagttagcccgtcgaatctcggagctcgaagagaactcccttgagaactcctcattgctgcacattaagttctccgcacgtatgcctaacggcgacatcgagaagaccactttcaagcttggagttggtccttgtgggctcactgtgaaggcccttaagtggaccgagtacgatgaccattacatccttgagcagctctgtactaacggagagattaagcgcttcaagtatgaccgggcggacgtccttggacgtatcgaacagcgcctcaagtagcaaacgactcactactagggagaccattacggtttcccttttcgcacatctatcatctggagatttaaacgctatgaacgcacgtatcaactttgagaagaccgtccgcaccgaacgcaaccgcgaagcacaggcttatgaggagtttgtgggccgcaagggtaagtacaataagactaagcgcggtggtggcgttaagggctccttccgttcccttgagcagtcacaggtcaaccaagagaaatactttgtaggagcttgatgtaatggcgattaatggggactatttatttgacggaaacactagccaatggtctagattaggatacgcagagcggagactattagatgaaaccgggctgacagtcatcatgcaccacgatatgctcagggattgcgttgtcttatcggtgtacgagcctaaaggtgacgtgctgatagagaagtcctttagtcactggtcgattgactcagcgtctgactggctggctaaactctgcaacgattacgcaagctggcgctaacgactcactactaggaacacctagcgttaaactcaaggtcatctacacaggtggccttcatgattaacactaactatcggagattgaacatcatgcaaccttttgcaaccaaaccgtataaagctgtaagtttcgtagagtcttccgtggagaaggcactcgaacgtgctggctacctcatcgcagacactaagcacgatggagtccgtgggaatatcgttgtggataacacagcagattccctatggctgtctcgcgtaggcaagaccatcccggcccttgagcacctaaatgggttcgataagcgctggcagaagttactacaggacgaccgttggattttcccggatggctttatgcttgatggtgaactgatggtcaaaggcgtagacttcaacactgggtctggtctactgcgcacccaatggatgaagcagagtaactacatgttctctacttgtgaatactggcacgatgagtgggcgaagaaggctaaccgccaaccgttccacttggacccatatcagctaaaagttgtcctttacgacatcgttccgctggacgttatcgaatccggtaacgactacgaagtcatgacactgctccgcttagagcacgtcaagattatcctcccgattcttcgcgaacacttcccggaaatcgaatggtgcctctctgagtctcatgaagtttacgacatgaccgaactcaatgcactgtacgaatccaagcgagccgaagggcacgaggggcttgtcgttaaggaccctatggatatctataagcgtggtaagaagactggctggtggaagatgaagcctgagaatgaagccgatggcgtcgtcgtgggtctcgtttgggggcactataggtctcgccaacgaaggtaaggtgattggctttgaggtcctccttgagagtggtcgcgtggtgaacgctacgaacatctcacaggaacttatggaggagttcacgcgagccgtggaggccacagcagaccatcacgaaggttcctacactaacccttacgatggctgggcgtgtcaaatcaagtacatggaggaaactccagacgggtccttacgtcacccatcgttcgacaagtggcgtggcactgaagagagtccaaaggagaaaatctaacgtgacacctttagaaatcatactcagccttgtcctaacgggtataattgggttttggataggatgggtagttggcactgacgattagctaacgactcactaataggaacacaaactggagacaacattatgatgaccattaacgtcacactaatcgttgtcttcctgatagccgcctttgcgtggactatcggggacgacgacaacactaacggaccgaaaggagcttgacgaatgcgattacattacaacaaatccaacggtatcttctcggttcgccgagcagaccgaagcaccgtagcagcaaccgagcgtcacggtaagttacctcgcatgttcgataccttcgagctagcgcctagcgttcacatcatcgttactcgcggtatctacgaagcagcggctgaaaagtccagacctttcgtacccgtggtggtcactaagtggcctaacgtgaagggattctttatgcgtcttaaggagattatcaatgagtgatattcttattaatggacacgagaatcactgccgctcggtgctggcctttggtacttgtgattgcggggcgaagcctcagcccgttaaggccgagggtggtaacgtatccgacaaacgcgcagcagactctgctgacgatggtgttaaacagccgagccattaccaactgttcgatggcgtagaggctatcgaggtgattgctcgcagcatgacacaagcgatgttccaagggtattgcttagggaatatccttaagtaccgcctacgggccgggaagaagtccgaactggcaaccttagagaaggacctagcaaaagctgagttctacactgagttgtacgaaaagcacaaggcgctgtgttatgacgccaagtgaatggtgcgaacgtaaatttgaggagaccgggaacattgattacctcgaaatgtataacctttggaaacagagaggaatgtaacatgagtgagaaaaccgtaagagtcatggtgtttgtcctgaaggaagacgcatggcccgaaggacaacacgagtggcactcgtaccccgatggaactgtgctaatgggacgaccctctattgggttccacatggaggctggcacaactcaccgccagcttcacgccaacccattgattaaattcaaggagctacgagatgtcccagcaatttaaagtaaccgtagaaggcgctacgatgtccgtagagttacccattgaggctgactctctggaacacgcgctggaactggcggaagccgagtatgagtctatcggtgtggtcacacgggttcgacctgtggtcgcctccgagtaagacctaacgactcactaatagggaatacttcccgagacctaatccacacacaaaggagaaacacacaatggcagtaatcgcacgtaacaaaatcgtaacctctggtgtcggtacagttgagccgtacgcctacctgaccaagccggactacggtaacgaagagaaaggcttcggtaaccctcgtggtgtctacaaggcaagcttaacgttgccaaacactgacccaatgtgtcagcgcatggtgcaagacatcgtggatacccatgaggctcactacgcagagcgcgtggctgagtacaacgagaacccgcctcaggtgcagcgcggtaagaagcctcttcttccgtacgaaggtgacctgccgttcatcgacaacggtgacggtactactacctttaagtattcttgctatgcgtcctatcaggacaagaagaccaaagagacccgccacatcaacgtaatgattgtggactctaaaggcaagaagattactggtgacgcggttccgctgttcatcggtggcggctctaagattcgcatcaagtacaagctggtgccttactcttggaaccctaccgtgggcgcttccgttaagctgcaaatcgactccttccagttaatcgagctggctacctctggtggcggtgagagcgaatgggacgaagtcgaaggcggctatgaagcacagcaggaagacaacggcggctggtctgagcacgaagagtctggtgcatcctctgacgatgacgaagatttctaatggcaggctatggggccaaagggatacggaaggtgggtgccttccggtctggccttgaggacaaggtgtccaagcagttagagtcaaagggcgtcactttcgattacgaattgtggcgcatcccttacgtgattcctgcaagtgaccacctgtacacccctgacttcctgttgcctaacggcatcttcgtggagactaagggtctctgggagtccgatgaccgcaagaagcacctgttgattcgagagcagcacccggagttagacatccggttggtcttctcttcgagtcgcactaagatttacaaagggtcgcctaccagttacgctgagtggtgcgagaagaacggcattaagtttgccgataagttaatacctgtggactggttgaaggagcctaagcgttctgtaccgttcgacaggttcaagcagaagaaaggagtcaagaagtaatcatggctaaagttcaattcaaaccacgaaaggagacctctcagattttcgttcactgttcagccaccaaggcgaccatggacataggtgtccgtgagattcgtcagtggcacaaagagcagggctggctggacatcgggtatcactttgtgattcgccgtgacggcacagtagagactggtcgcgaccttggggccgttgggtctcacgttaagggctacaacgagacctctgtaggtgtctgtctggtgggcggtatcgacgctaaaggtaacccagaggcaaacttcacgcctgagcagatgcactcgttacagaacgtcctgaccacgctgaagggcgaatggcctaacgctgtgattatggcgcaccatgacgttgcacctaaggcatgcccaagcttcaacctgtctcactggctgaagactggcgagctggtcacgagcgacaggggctaacaactcactatagggattacataacgtagtccctgttgtcgcacatttactcaaactatggtcaggctaaggtgcacttggcgtagcgctgcgtttcatcagggttcgattccctgactgaccacctatcacttatggagattactttatgcgcaagttagaagatgcattcgttgtcattgtaatggggtgtgtggcgttgagcatattaacgctaacaggcgtactcgtagtttccctgctacgcaagtttatactcctatgagttacggggacgctatcgaggatggtcaggagagcatcttcctgttccatgcaccatgcgaaaactgtggttcttctgatggtaactctgtgtactctgatggacacgagtggtgctttgtgtgtcagcacagggtcccggcctcagatgaacgcgagaagaagttatcatcaagaagacccagaggagggaaaacagagatgacacaaggtggtaacgcagtgttagactttggtgccaatgagggtcggtacgtagacctgacggcccgaggtatctctaaggcaacatgccagaaagctggctactggattgccaagcgcggaggcatcacgtatcaggtggctgactaccgtgaccagaatggttcaatcgtctcccagaaactccgggataaagacaagaacttctctacccgagggtctcacaaaggcgatgcgctgttcggtaagcacctttggaatggcggtaagaagattgttgtcactgaaggtgaaatcgatatgctcaccgtgatgcagcttcaggataacaagtggcctgtcgtgtctataggacacggagcgtcagccgctaagaagacatgtagtgcaaactttgaatacttcgattcgttcgaccagattatccttatgttcgacatggatgagccgggtcgtgcagccattgaggaagccgctcaggttctccctcctggtaaggtacacgttgcggtactgaccgagaaggatgccaacgagtgcttactcaaaggcaagggtaaggaggtactcgaccagatttggaatgcagcaccttgggtacccgatggggtagtcggtgtgatgtccatgaaggaccgtgtacgtgaggccatgaccagcgagcagagcgtaggctacttgttctctgggtgtgcagagctcaacacgaggaccttaggtatccgtggaggtgaagtcgtaatggtcacctcaggttccggcatgggtaaatcaacgttcgtccgtcagcaactattaggtttcgcaagggaccaagggcttaaggttggagctgcgatgcttgaggagtccgtagaggaaaccgtagaggacatcctcgggatagccaacggtgtccgacttcgacagcaacctaaggagttcaaacagaaacttatcgaagacggtacgtacgataagtggttcgatgagctctacagcagcgaccagttccatctttatgattcctttgcggaagctgaagtggaccgactgcttgcaaagttacactacatgcgcacaggtctcggctgtgacgttatcgttctggaccacatctcaatcgttgtgtctgcctcagaggaatccgatgagcgcaagatgattgaccgcttaatgacgaagctcaaagggttcgctaagtctaccggggtggcccttattgttatttgtcacctgaagaacccggagaaaggtaaagcccatgaagaaggacgtgctgtttccattactgacctgcgtgggagtgggagcctccgccagctctctgatactatcattgccttggagcgaaaccagcaaggtgatatgcctaatcttgtcctcatccgtattctcaagtgtcgctttaatggtattggtgtcggcattgcagggtacatggagtacaacgaaaagactggactcctcgaaccgtctagctacactggcggagaaggagaagaaaatactggctgggaagacccagacgacgactattaacaaccaataggagaaccatcatgattaaacttatcgaagctctgggccgtttagtggtccgcctgtacatcaacaaggcaaaacatcacgaccgcacagctaaggctgacgcaaaggtcgctgagaaactggcagcaggcgctcaacgtgcgcttgaagcatccaaagagaataccgcagaggccgcgaagtttgcagccaaggctcagaaacttaaggagttcttctaatgaccagtaaagtatcgacaactatccgcctgtccgacacggttgaccaatggtctcgccgggtccacgtcaacgtccgtaaccaaaaggtcaccacagtgtaccgctggaagtccaaagacggtcgtgaccacactcagcgtattaccctgaatgatgaccaaacggctcgcctgttgggagcgctgattaatgcgcaatctaaagtgctgttaggtgatgagcctcgcaccaaggcattcggggagagcctaagcaatctgctccagtgataaactcaaggtcatcctaacgggtggcctttatgattattactgattgacaactacggagaaaatacaccatgaaatacaccatgcgtaaacctgaagaaattcgtgcggacatcgacaagctggtcaaagagttggagactgttaaactttacgaagccaagcgggacgcagcgtgtcacattctcatcaacttagggtggacctatagtcctcagaagggctggaagaagccggagccgctgcataattggaaagagttcgataaggactcaatgacacacattaaggctggtgattgggtacttatcgacgcactggtcccgacactaggtggtgtcgttaagtgtggtgcattcgtgcgggtggtaagtggcacccgagtgattgtgtcgccgattattggtgtaagcaccagaggcgctcacgtttccgacatccgtgttgagcttacgcctcgaagctgtaccgtgactaccatgaaggcggcggcagagcttccgtttcaacgataaccattaaggagggcatcaatgctcgtatccgatatcgaagcagacaaccttttagaacacgtaacgcagttccactgtggggtcatctacgactacagtacggaagagtacgtatcgtatcgcccttgggacttctcatcgtatctcgatgcgttagaagctgaggtggctcgtggtggacttatcgccttccacaacggtcacaagtacgatgccccggcgttgaccaaactggctaagctacagttaaaccgagagtttcacctgccgcgcgagaacgtgatagacaccttggtcctcagtcgtttgcagtacgcgaacattaaggataccgatatgggcctgctgcgttccggtaagttacccggtaagcgattcgggtcacacgctctggaagcatggggctaccgtctcggtgagatgaagggtgagtacaaggatgacttcaagaaactccttgaagaacaaggcgaggagtacactccgggtctcgaatggaagtccttcaacgaaccgatgatggcgtacaacgttcaagacgttgtggtcaccaaggctctccttgagaaactcctgagtgacaagcactacttccctcctgaggatggttgcggggataactggtggatgcacgacgctgtgacattctggaagtattcctgtgaggccgtatggctggaacaccgggctgcttggctactcgctaagcaggaacgcaacggattcccgtttgacacgaaggccattgaggcactttacgttgaactggcgggtcgtcgttctgaactccttcagcaacttactgatacctttgggacttggtatcagccgaaaggtggcaccgaaccattcctccacccgcgcaccgggaagcctctccataagtatccgagagtgaagaccccaaagcagggtggtgtctacaagaagccgaagaacaaagcgcaacgcgagggtctggaaccgtgtgagctcgatacgagagactacatggctggcgctccgtacacaccagtagagcacgttgtgttcaacccaagtagccgtgaccacattgcactgaaacttcaagaggccggatgggtacctacggaatttaccgaaaagggagcacctaaggttgacgatgaggtcctcgaacatgttcgtgtagatgaccctgagaagcagaagtgtatcgacctcattaaagagtacctgatgattcagaagcgaatcggtcaggcggctgagggagacaaggcgtggttacgttacgtagcagaggatggtaaaattcatggcagtgttaatccgaatggtgcggtcacaggccgcgcaacgcacagcttccctaacctcggtcaagtgccgggtgtgcgaagtccttacggtgagccttgccgcgctgcttttggtgctgagcatcatcttgatggcatcactggcgtaccttgggtacaggctggcatcgacgcctctggtcttgaattgcgatgcctcgcacacttcatgtccaagtacgacgggggagattatgcagacgttattcttaacggggacatccacacagtaaaccaacaggcggctgagctaccaactcgcgataacgccaagaccttcatctacggtttcctctatggtgctggagacgaaaagattggacagattgtgggagcaggtaaggaacgcggaaaggaactcaagaagaaattccttgagaacaccccagcaatcgcagcgttgcgtgaaggaatccagcagaccctcgtcgagtcatctcggtgggttgccggagagcagcaagtcaaatggaaacgacgttggattaagggactggatggaagaaaggtacacgtacggtcaccacatgccgcgctcaacacgttgcttcagtcagcgggtgcgctcatttgtaagctgtggattgtcgagactgaagagttgcttcttaaagcaggattgaagcacggatgggatggcgacttcgcctacatggcgtgggttcacgatgaaatacaagtggcctgccggaccccagagatcgcacagcaggtgattgacatagcgcagcaagctatgcgtaacgtgggagaccacttcaagttccgttgccgtctggatacagaaggtaagatgggtccaaactgggccgtatgtcactaataatacaggagatttaacatggctattaccaagcgttgtatcgtaagtttcgacatgaagttcgtggcttcgagtgaggatgtggaagggtacaccaagcgtatgctgagcgtgtcccgtaagattgctaacggggagaaggtatccggcatcgagctggaacttgcacgtgttgctgccaccgagggcatcgaagcgtccatcgagttgtccatgaagtctgccattgttggccgactgaaggatgagctacgagagcctcaggtgtcgtgtggtaacttccgagtggggttcaagcaatgagtgagtacctcaaagttctggcggccctcaagggctgccctaagtccttccagtcgaactacgtgcgtaacaacgctgcgttagtcgctgaggctgcgagccgtggtcacatttcgtgtctgaccatgagtggtcgtaatggtggcgcttgggaaattaccagtgccggagtgaaattccttaagacccatggaggttgtttatgaaggactttttaggccaagaggtatcagtgggtgaccgcgtggtgattacctcgtacggtggctacggacttactgaaggtatcattgagaagatgagcccaaagaccgtagtggtacgcacaagccccggcaagtatgggacaacccgtaaggggcctgagtatttcgtaaagattcaggaggtgcctagtgagtaagcacactttgttatccttcagtgacttccgggcaacccagcctaagtccaaaggcgtccttgtgatggatggcgactggatggtctttcaggccatgagtgctgctgagtttgatgcttcgtgggaagaggagatttggcatcgttgctgtgaccacgctaaggcttggggtatcctccagcagtccattgaatcctacaagtcccgtaaaaaggcttggaagaatgctgacgtagtcctagcgttcaccgaccgtgtaaactggcgcaagctgttggttgacccaacgtacaaaaagaatcgcgccgtctctaagaagcctgtgggttactttgagttccttgcgcgagtatgggatgagtacacaagcatccttgagccgcgactggagggagatgacgtgatgggaatcatcgggtctaaccctctggtctacggttacgacaaggctgtccttgtgtcctgcgataaggacttcaagaccatccccgattgtgacttcctgtggtgcactactggtaacatcctcgtgcagacccaagagaccgctgactggtggcatgcataccagatggttaagggcgacatgacggatggttacggcggaattccgggctggggtgataccgctgaaggtttcctcaacgaacctcacattgtggagcctgtggtgtccgtactgaagtccggtaagaacaagggccaagaggttaccaaatgggtgaaacgttcccctgagcccggagagacgctctgggattgcattaagtccatcggtgcgaaagccgggatggaacctgaggacatcattaagcagggccagatggctcgcatcctgaggtctgacgagtacaacattgaaacaggagagattactttatgggacccgtctctgtcggagaagctgctgctgtcatccttatcgtaggaccgattgcgcggttactgtgggtgctggcgtaccatagccgtaagtcactgaaagacaacacgaagtagtatgttcgagtgtacaccttccgctaccgtgtgagctaacgactcactataggggggagatgtatactctatagatattactttaagattactttaagaggagcatcttatgttacgagaaatcacgaatactctggataacccttcagacatcccagctatctctaagtcggctatcagctacctccagtctcgctttaacgcagactacgtggcggcatccggtgagatggacactctgaagactaagggttacagcgaggcggtaatccttgggttcatcatgggtctgcaacacgctacgtccgttctggatgacatggagtacattcgtagtttacctaaagaggagtgattattatgtgcttcagtccaaagatgaaagcgccaaaggttgacaccgctcaggtagtcccaccagctccactaacggaacagccaactggcgtggtcttcggtggaaacgatgaggacaactcagcggataccacagcgaacgctactggtcgcaagagtgtcaccgttaagaaagacccagcgaaggccacgagtgccactaagtccatcaccaacaaggcgttcaaccaatgattctacaaagagagcaatcaaacgactttacgcgagagttagccaccctgtggacttgggagcgcctgaagacacctaaggggttctgcacgttcgacgaatgggctgaccacgtaaacagcgtcatggacgcctcagattacagtgagttcatacttagggacccttctaggaacccaagagcggtggcctacttcgcgtgtcaggtcggtcagtgcatccaccatcacggtgacgtgcttgacgttggcttcatggtcatcaacccatccttcaaggacaccagaagtgtctggagggctatcctagcggttgcccgtctgagaggttgctcatggattgcccgtaagcaacaccagccagatgggtccattaaaactatttactcggaggtgaaaatctaatgggtagtatcgtaaagaaaatcactaaggcggctaataagctgactggtggcttgctcggtaaagaccctgcgatgccacaggcagtagccccagagcctgtcgctccggccccggtggaagcacctaaggtcgaacaagtagaggacaactcgactgacactgagtcagacaagaagcgtgtccgggcgactggcaagaagtctcttagcgtatcccgtaactctggcgctggtatcaacgtatgactggttatggggagggctaatagatggctactgtaaaacgtacagggttcggtgaggaatccgcaaaggctgtgtacgaccgtttaaagaacgataggcaaccttatgagactcgtgcagagaactgtgcgcagtacacgattccctcactgttccctaaagactccgacaactcctctacggactacacaactccgtggcaggctgtgggagccagagggctaaacaaccttgcgtccaagctgatgctggcgttgttccctatgcaatcgtggatgaagttaacaatcaacgagtaccaagcggaatcccttgcgggtgaccctgaagtgctcactcagattgacaagggtctctcgaaggtcgagcgaatcctgatgaacttcatcgaaaccaacagttaccgtgtgaccatgtttgaggcccttaagcagctcatcgtggcaggtaacgttctgctgtacatcccggagcctgaaggcccgtacaacccactgaagctgttccggttgaactcctacgtggtacagcgagatgcctacgggaatatcttgcagattgtcacgctggaccaaatcgcgttcggtgcgttacctgaagacctccgctcggaagtcgagaagtccgctggcgataagaaaccagacgacctcgtggacgtgtacactcatatctaccttgacgatgactctggagactacctcaagtacgaggaggtcgaagagattgaggtccaaaagtcagacgctagttaccccgcagatgccttaccgtacattccggtcagaatggttcgccttgacggtgaatcttatggtcgttcttatgtcgaagagtatcttggtgacctgcgctcccttgagaacctccaagaggccatcgttaagttcgctatgattagtgccaaggttatcggtctggtcaacccggcaggtatcactcagcctcgacgtctctcaaaggctcagactggtgactacgttccgggccgtaagagcgacattgagttcctccaactggagaagtctcaggactttaccgtagcgaagaacgtgagtgacgccattgaggctcgccttgcgtatgccttcatgttgaactcagcggtccagcgtacaggtgagcgagtgacagccgaagagattcggtacgttgccagtgaacttgaagcgaccttaggcggagtctattcgattctgtcacaggagctacagttacctctggttcgtgtactcctcaagcaactccaagccacccagaagattcctgatttacctcaggaagccgtcgagccagctatcagcacaggtctcgaagcaatcggtcgtggtcaggaccttgagaagctcaaccagttcgtacaggcgctcggtatgttgtctccgctgtctcaggacccggatatcaatatggctaacgtcaagctacgtgtggctaacgctattggtatcgacactacaggtatgctgatggacgacgacatgaagaaccagaagatgggccaagaggctgtccgcgaaggcgctatggcagcagctcaaagtgctggtgcaggtatgggctcagcggctacttcaagtcctgaagctatgcagggagcggctgaccaagtgcaggcagcagcaggttaatagcaaacgactcactatagggagagatggaacattacgtttggtggttgccaatttacgattggacatccggctgccgagcttggcgtaatggtgccctttagtctataacaacatggagaacaatatgtccggtgaatctaacgctgacgtttatgcgtcttttggtgtgaactctgctgtcgtgactggaggtaatccggtagagcacgagcagaacatggttgcgttgaacgtagagactcgtgacggtgatgacctgattgaagctcacgatgagcaacctgaagacctgtacaatatcgaggacaagttcgctgaagaacaagacccgaaccgtatgcaggtccgtatcggcgaagaggcttcagaggatgccaacgctgatgaagcggttgaagagaacgcgggtgaggaagaactgagcgaagacggcgagactcctgaagagttcgtgccgcttggtgatgcccccgcagacctgacggaagtcactcagcaaatcacagagcacgagcagggattccaagagatggtggcggacgccatcaaccgagggatgtctgaagaggacctagcgactatcgaagcggaatacgctggtgatggtattagcgatgcgtcctacgagaagttgaaagccattggttactctaaggcgttcgttgattcgtacatgcgtggtcaagaggcactggtaaaccagtatgtcgctcaggccaaagcgtacgcaggcggtgaggagcgattcaacgctctccatgcgcaccttaagtcaaccaacccagaggccgcaagtgcccttgagactgctttcggcaaccgcgatttgggtaccatgaaggcaatcatcaatctggctggctcctcgttcaccaagaagttcggcaaacctgccgagcgttcggtgactaaacgtgccattccggtgaaacctcaggtcaccaaagcggaaggcttccagacccgtgacgaaatgattaaggcaatgtccgatagtcgttaccgttcggatgctgcgtaccgccgtgaagtcgaacagaaggtaatcaattcggccttctaagagcaaacgactcactatagggagaccgcacaatctgacaaggagcgaaagcatctccctttagttacacattgagaaccaactcgattcaagtagtaacacccactttatctttaattcatgaataggagatttacattatggcagatatgaaaggcggtcagcagattggtactaaccaaggtaaaggtcagagcgcagcagacaaactggcgttgttccttaaagtgttcggtggtgaagtcctgaccgcgttcgctcgtacctctgtgaccactaaccgtcacatgattcgttccatcgctaacggtaagtccgcgcagttcccggttcttggccgcaccaaagcagcctatctgcaaccgggccagtctctggatgacaaacgtaaagacatcaagcacaccgagaagaccatcaacattgacggcctgctgactgctgacgttctgatttacgatatcgaagacgcaatgaaccactacgacgttcgtgcagagtacaccgctcagttgggtgaatctctggcgatggcggctgatggtgctgtactggctgagctggctggtctggttaacctgccgtccaccactgacgagaacattgcgggtctgggtaagccttccctgctgaccctgcctactatcaccgcagaaacctctgtgactgacgttgagaagtacggtcaggaaatcattgcgatgctgactcaggcacgtgctaagttcactaagaactacgtcccggcttctgaccgcaccttctactgcaccccggaagcgtactctgcgattctggctgcactgatgccgaacgctgcaaactatgcggctctgattgaccctgagcgtggttctatccgtaacgtcatgggcttcgaagtcgttgaggttccgcacctgactgctggcggtgctggtgatgaccgtgaagacgaaaccactaaccagaagcactccttcccggcaactggtaacgtcaacgttgacaacgtggtcggtgtgttccaacatcgttctgctgttggtaccgttaagctgaaagaccttgcgctggagcgagctcgtcgtcctgaatatcaggctgaccagattatcgccaagtacgctatgggtcacggtcagctccgtccggaagctgctggtgctgtagttttcaaagcagcgacttaagagtagcagcctttagtgcgaccgtagagagtgaagtggagccgaccccagaggtagccgccgaagtagctctcacgcctcaacagaaggccgcaattactcgtgctcgcaacaaggcacttaagtcgtaacgtttagccaaaccccatggggccttcgggtcttgtggggttttttgcttctttaaggagataccaaatgtctaaccttccgtttaccggggaactcgacgccattaacgaaatgttagcggctatcggggaagcccctgttgaaacactggatgacgagaataacgtagacgtggctaacgctcgcagaatcctcaataagattaaccgacagattcaatcgagagtctggacgttcaacctagaggagggtgcaacgttgacacctgatgtcgccactaagttaattccgtacagtccagactatctgtccctgatgaacaacggcggggccagcgtatacgttaaccgccaaggttgggtgtacgataagtcagctaacagtgaccagttcgatggtcctatcgccgtggacatcgtgagactcaaagattacaacgagatgcctgaatgcttccgctcgtggattgtcgctcgggcaagccgccagtttaactctcggttcttcggggctgaggatgttgcacaggacctcgcagaagaagaacaggatgcggcacagcgttgctttgagtacgagctggactacggcaagtataacatgctggacggtgacgccttcgttggtggtctactgagccgataatacagataaggaggacctaatggccctagtaagtcaaagcattaagaatcttaagggtggcatcagtcaacagcctgacatccttagatacccagaccaaggggccgcccaagtcaacgggtggtcctccgagactaatggtctacagaagcgtgtccctacgaccttcattaagggtctcggtggtcaagggttcttcgggccagcgccactggtgcacctgattaaccgagacgagaatgagcgatattacgctgtgttcaccggggatagaatccgtgtgttcgagctggacggtaccgagcgtcaggtccgagggtccttcgagtacgtcacaacgaacaacccaagggatgaccttcggatgattacggtggctgactataccttcatcgtgaacaagtctgtggaggtccgtgagaaccgtggagacttatccacaggtggtaacttcaaggacaacaaaacggcactcatcaacgtgcgcggtggtcagtacggtaagctactcaaggtcaacctcaacggtacttgggtggagcaccaattgcctgacggctcagacccgaagcagtcccctcagactgatgcccagaacattgcggctgcactgcgtgataaacttgcggctgcgttcccatcgtggacattcagtgttggtacggggttcgtgtacattgaggcccctgtagacgctaccattgggaccctacagaccgctgacggttacgctgaccagttaatcagcccggtaactcactacgtccagacgttcgctaagctacctctgaatgcgcctgacggttatatcgttaagattgtcggggacacctcaaagactgccgaccagtattacgttaagtacgacgaaaagcagaaggtctggaaggagactatcgggtggaacgtaccgatgatgattgtttacgagtccatgccctatacgttggtccgagcggctgacggcgagtttgacttcggggttcacacttgggacccacgcaaggcaggcgatgaggataccagtccgatgccatcattcgttggcggtaagattaccgacgtattcttctggaggaaccgtttaggattccttagtggtgagaacgtggtgttgtcccgtacagggaaatacttcgacttcttcccaccgtctgtggctaacctgagcgacgatgacccgattgacgtgtccatcagtcataaccgtgtgtcaatccttaagtacgccgtaccattctctgaggagctcctgctgtggtccgacgaggctcagttcgtcatgaacgcttccggggtactctctgcgaagtcagtagagttgaacctgacgactcagttcgatgttcaggatggagcgagaccttatggcatcggtaggaatatctacttcagcgccaagcgagcaacctatagctcaatcaatcggtactacgctgtaggagatgtgagtgaggtgaagaacgccgaggacatcacggcccacgtccctgagtacatccctaacggggtcttcagtatcaacgggtctggcgtggagaactacgcctcagtgttgaccacaggcgcaaagaaccgaatatacctctataaattcctctacgttgatgagcagattgcgcagcgctcttggagccactgggagttccctaaggagaccgaggtgttggcggctgactgtatcggctcaacgatgcacatcatgatgcgtaacgggaccgactgctggctggctaacgctgagttcaccgaggacactctggacgttgacggtgagccttaccgggtacacgtggacattaagaagtcctacacgattcctgaaggcaagttcaacatggataccaacctgactaccctgagccttcgcgagctgtacgatatggacttccctgatgggtggaccatgtcaatcgtagagcctgacggtagactcacagagtacgtcaccgggcaacctattgagtacgttggggacctgactggcgttaaggtgaccgtagggtttaactacacgttcctttacgagttctctaagttgctcatcaagaagaccgacccggatggttccacctctaccgaggacaatggacgtctccagttgcgtagagcctgggtcaactacaaggactccggtcagttcttcgtgaaggtcaacaacggtagccgcgagtttagctataacgttggttacggtaaggtagggaccactggtgtcaccttaggtaaacctgtattgaaggacgggcagtaccgcttcccgattgcaggaaacgctctgcgtaacgctgtgaccattgagtcttcctctccgacccctttaagtatcattggggctggctgggaaggtaactacgctcggaagtcttcgggcatttaataaccaagtccctatggtgagcaaacgactcactatagggaaccaaacgacacaaaacgactcactatagggaaccaaacgactctgggagggtttcgttatgttcattaggaaaactgtaagtaatgactttgagttattcaccccggcctaccatgacctacttgaagcgaaggctatggggattgaaccatcgttccctgaggcgtccgagtgtgtcacgttagaccacggtgggttccctctggcgattggtggtaatcatggagaccaagtgtggttcgtaacgagtgaccaagtgtggcgactcgacagagcgctgaaggtcagattccgtaggtgtatatgcgggtatcgcgatgcaatgctcacggtctaccctacgctgtggaacttcgtttacattaataacactccacacataaggttccttaagtccatcggggcggtattccatgaggagtacactcaggatggtaaattccaactattcacaatcactaggaggtaactatgtgctggatggtagcgattccgatggctattgccgccgctgggtccctcatgaagtccaactctgagaacaaagctatcggtgctcagaacgatgccatgcgacgtcaatccatggagcagctgaaggcaaccaacatcgccaacgctgatgacacccttaaggcccgagcggctcttgaggacgcttcaagtgaactctcgacccgtaacctcaacaaggtacaggcgatggggacactccgagcagcaatcggcgagtcaggtcttgagggtaactcaatgtcccgcatcagccgggtcaccgagggtcaatacattcgggaagccaacagtgtgaccgagagctacaaccgagactacgcgagcatcttcgctggtcaggtaggccgtaccgagtccaccaagtctcagattgaggcgaacaacaaaggcgaactcaaaggtaagtctggtatcgaaacagcacttgatgctggactgtctgctggcgcggcgtgggctggtagctcagcttcaggtggcctgttagccaagggaggtaagtaatggcaagtaaagtttatagtgctttaggtaacatggcgactcccggaatgtctcgactgagaggcttccaagggcagggctatcaatctgcttctgtcaaacctgaagacacccgccagtgggatggcatcatgcgattcgctgagctggctggtgacgtttaccagaaggtagaccagaagaacaaagacaaggccgatgagcggtccaacgagattatccgtaagttgactcctgagcaacgtagagaggccattaagaatgggaccctgctgtatcaggatgacccttacgcaatgcaagcgttacgctttaagactggtcgtaatgcggccttccagattgacgatgacgtcatgcagaaggttcgcgagggtcagttccgtagtcgccaagagctcgacgaatatcgtcactcccggctacaagaaggtgccaagaagttcgctgaagagttcggccttaacgaggctgatgaagatttccagcgtggcttcaacgataacatcaccgagcgtaacatctctctatatggtacccacgattcgttcctgagtgaccaagctcagaagggtgccttggtgaattccaaggtggaacttaacggtgtcctgaatgacccggacatcctcaggtctcctgatggtgccgagttcttccagaagtacatcgacaacggtcgtatcactggttccattccgtcagactctcaggtctcacagttaatctctgcgtcccttcaggacgttgtacagcgtgagggcggcgctcagttcctgatgaaccttgaagataagaaggtgacccttaacgggaccaccagtaccttcagggaacttctgggagacgagcagtggaacatgatgaaggtgaatgctcagcataccgagttcaccctcaatgctaagcgattcgagaagttctccttgggtatcaacaatgcgttgaaccaagctgacccgtcgaagggctgggagcaacttcaggcaatcaaggagcaactcgacgaaatccaaccgggcgaggagatgacccccgagcgccagcagttaatcaacgctcagcagcatctccagaacacgttcgctcagaagtcagcagctaccgctaaggaactggacaaacagcagaagtccatgaacaaacaacaagttatcgagcagcaattcaacaagcgcctcgctggggaatacgtctccactgcgtttgctgatatgccaaccaacgagaacactggtgagttcacccatagcgatatggtcaactttgcgaacaacaagttgcagcagattgagcagatggacctgacggatgaacagaaggacgccatgaagttgaagtaccttcgggctgactctaaggacggtgccttccgtaccgctgtgggacaaatggtctctgacgctggtaacgaatgggccgctgcgattatcaacgggaaactccctgagaacaccgtagcgatggacaacctgcgacgtatgcgcaataccgaccctgaccttgtggctgcgctgtaccctgacaaggctgacctcttcgtgaccatggacatgatggataagatgggagtcaaccctcagatgctcattgatggcgagaagtaccgccgtacgatgaccaaagagatgcagtatgaggacgataagtcttgggcttccctgaagaacaactctgagtcccctgagctctcccggttgccgtcgagtcttgacgctatggcccgtaaggtatacgacgctgtgaagtatcagactggtaactccgacatggctatgcagcaggtcgataagttcctcaaggactccaccacgactttcacctcggatgacgtggacggtagcaccatcggtgttctgcctaagagctcccttcaggtgaccgatgaccctaagagctgggagcaaggtcgtgacattctggacgctgcccgtaagggtatcattcagaccaacccttggattaccaataagcaactgactattgtccaatctggcaacgggttccgcatgattgataccactggtaacgtcaatatctactacgataacgacatccttcgccgtgagtatcagcgaaccactcaagctgccgagcagaaggcacgtgatgaggccattaagaacgccaataagcgagcacctatcgcagccgctacgagggcccgagaggccgctggtgagcgtgttagagccaagaagaagaccgtaccgaagttcatctacggaggcggtgagtaaccaacagaaaccataaggaggccctgtggctaaatacgataagtcaattccaagcgcctatgacgctgtgttccaacaagcggctgatgaggccggggtctcctatgacctgctgcgtaaagtagccttcaacgaatcttcattcaaccctaaggccgtctctaagactggccctatgggcatcatgcagttcaccaaagctaccgccaaggccatgggtctgaacgttacaggtgacgataaggatgaccgttacaacccggctctggcaatcccggctgctgctaagcaccttgcgtctctcgttaataagttcaacggggatgaactcaaagccgccttagcgtacaaccaaggcgaaggccctgctggtgctccacagctagaagcatatgaccgtggggacttctccgcgattagccctgaaggtgtgggctacatgcgcaagctggcagacgtagctcgcagtgaccgtaaaggactccttgaggagttcgggggcatcaccccaaaggctaaaggtatccccgctgaggacgcctttgcgggtctccaagcgcagtctaaggtaggcgataccttacctcagtccaccgggttctccattaaggggaccgagcaggaggctcctaacgagccctttgctaagactttctgggagacccacggtactactctggatgagtacaatcagcgctctacgttcttcgggattggcgatgccaccagtgcagagttacagaactcagcgttgggcgttgcgttccgagcggcccgagtggatgactcatacgatgtcttcaaggacaccatgacgccaaccaaatggaacagcaccacatggtcacaggaagaccttgagcgcatccgtaacgaagttaagaacccgagctacatcaacgtagtcactggcggttcccctgagaatctggatgctctcatcaagatggctaacgagaactatgaggctgaccgtaaggctggtgacgctggacttggtgccaagctgactgctggtatcatcggtgctggtgttgacccactgagctacgttccgatggttggtgtagccgggaagggacttaaggttgccaacaaggctcttatcgtcggtacccaatcggcgggactaaacgtagtctctgaggggttccgtacgtccatcgcaggtggtgaagcccactacgcggatgctgccttaggtggccttatgttcggttccggcatgtctgtccttggtgacgctatcgctaagggtctcggtcggactgactacaagaatgactttgcgggtcctgcgatgcgcttagaggcccgagagtctaacttcaacgctggcggtgctgacccgacgctgcaccctgtggataacttagagttcaccgggagccgtggggccgtacagttcgctgagcacccagcagaggaaggcgctgtggtcctgccgtcaggtttaatcctgagcgagaccaatccggtcaacccgaagctgcgcaatgagttcgagcagattgaccctgagcgagcgtccaaaggtatctctcttggtggattcactgagattggcctgaagactctacgctcagaggacgctgaggtgcgtggcttagcgactgaccttgtgcgttctccgactggcatggagggaggctctaacggtaagtttggtgctacagcatccgatgttcacgagcgtctccacaacactgaccagcgcatgtacaatcaactctatgacgctatgcgtaaagccatggatgacccagagttctccactggaggccagaagctgtcacgtgaaggaatccgtcaggaaatctatcgacgtgccgctatggctatcgagcgacctgagctacagagtggactgaccaaaggtgaacgtaaggtgatggacctgatgaaggaacactttgataccaagcgtgaactgatggagaaccccggcatgttcggtcgtatggacgccaccagcatcttccccggaagtcgccataagggtacctacgttcctaacgtgtacgaccgggcaaccaagcagatgttcatccagcagtacggcgaggagggtcttcagaacgccattgcgactagctggctgacctcttatcgttcccgtcctgaagtcaaggcgagagtcgatgagtacctgtcggagcttaacggtggagctgaggtgacccctgagatggtccagaaacacgctatggataaggcgtatggtattagccacaccgaccagttcaatgcgtccagtgtcattgacgacaacattacgggccttgttggtatcgagaataactcattccttgaatcacgtaacttgttcgacagcgacatgcctatcactctgcctgacggtcagacgttctctgtgaacgacctaagggattacgatatgttccgcatcatgccagcttatgaccgacgcattaacggtgacattgcaatcatggcaggtaccgggaagaccaccaaggacctcaaggatgccatcatggcactcgataagaagtccgaaggtaacggcaagctcaagggtgaagtggaggcactgaaggacaccgttaagattcttacagggcgagctcgacgcaacaacgatacggtattcgatacagcactgcgctcattgaatgacctttcgttcttcgctaagaacgcctacatgggcccacagaacctgacggaaatctctgggatgctcgctaagggcaacgttggggccatgctgaataacatcccgattcttaacgacatggttaagcaaggcggtatgaagggttccgaaatcaaggaactccacggtgttctgttcggtcgtgagtttgaccagcttgttcgtcccggtcgtgcggatatcatccagcgtcttcgtgaggcttccgatacgtctgccggagtggctaacgttgtgggtaccattaagtttggtacgcaggaactggcagcccgctctccgtggaccaaggtcctcaatggtaccgctaactacattctggacactgcccgtcagggtgtgcttggtgatgtagctaacgcagcgctcttagggaaatccgctaagttcggtaaggacaacttcctgaagtctgcgagtatctctaaggaacagtgggctggcatccagcaactcttcaaggaacatgctaaggtcaacgaggatggttctttcagcatcatcgacaagaagaaattctctcaggacccacgcgctatggacctctggcggttagccgataaggttgccgatgagaccatgctgcgtccacacaaggtttccaatcaggactccaaggcgtatggtgcaggcgtgaagatggcgatgcagtttaagaactttgtcgtcaagtcactcaacggtaagttcgtccggtctttctatgaggccacgaagaacaaccgagcgattgaccaagctctcacccacgccatctctctgggtctcgctgggacttactttgcgatgcaggcccacgtgaaagctctgggtctacaggaagaccaacgtaaggactacctgaagagagcgctgaacccgaccatgctggcctacgcagcagtatctcgaagctcccacttaggggctcctctaggtatcgctacgatggtaggtggtgccctcgggtaccaggatgctcagatgctccgttccaccattctgcctaaaggtgtcgaagagaaacgtaaaggaaccaacgaggtcaaatctcgggatgtcctagcgaatcttggtggcaaccttgcagcacaggtgccagctctgggatacgttgcgtcagttgcgtctaccgcgatgaacgctacaggtgtgctgacagctccgaacaagcctaccgaaagggacttcatgactggcctgatgaatgccaccagagagattgtacctaacgacccactcacccagcagctcatcatgaaaatctatgaggagcagggtgtacgcatcaaggagcccgctaagcagggctaacgactcactatagggagagacctaataagtcctcccttaaagtctaactataaggagaaacaatatggcatcacctacggtcgttcggactgttaagcgttatcctcttaacggtagcattcgagacttcgatatctcgtttgactatctggcccgtaagttcgttgtggtctccctagtggatacctcaggtacactggagcgccgccaactggtcaacgtgacagactaccgcttcaccacaaagaactccatccagaccactgtggcgcatggtgctgagggttacgatgagattgagattcgccgtgtcacctctactacagagcgtgtggtggacttcgctgatggttcggtacttcgtgctcaggacctcaatgctgctcaggtacaggcgatgcacattgcagaggaaggtcgtgaccaagccctgctgtctatctctgtgaccgactcggggcaacttgacgcccacggtatgcaaatcattaacgtggctccggggacttctccgagtgacgccatcaacaaggaccaactggatactaccttaggtgaaatcggtggggtacttgatgaggttgaagaaaccaagcagtggattaaggactatatcgataacttcgtgaacgatacagcgaaccttaagaacgtcctttgggtctacaacggtggtattgctgtcggtggtgagaccgagattacggtaaccaaggaaggaagcattgtgaccatccctgcgctgtacatcaacggtgaccgtcaagagcgtggctggcagttcgactattcgtccgtcgataagaagattatcctcagcaaaccgctcaagtctggtgacttcgtggcgtgtctgaccgctgaaggttccactccaatcatggacctgctggcgtcaactgaaggtgcttccaacattgggaccactaacggtaagactgtgcaggagcgcatcgacgagctgactcaacgtattgactctgtgaccaacttgcagaccattaacgtgctgtctcatggtgctgttggtgatggcgttcatgatgactacccggcgttccagaaggctctactcaaagctcacgagctgggcggtgctgtggttgagattcctactccgaaggtggagtggcgtatcggcttcccgctgtacctcttcagtaacacctcggtgaaaggctctggtgttaactgtcgcatcaacttcgtggacccgctgtattcccgcaagtcccgctctgggttcgtcattgggtctggatatgagcagaaccgtgacaaggccattcagtgtctgcgtgacggcacttgggcgactaccgggtccgtagtggatacctcatttgtagagccagcacgtggcgagtacatccgggaccatctggaccgcgtacagtcagccaactgctcaatctctgatgtctaccttgtggcaacctatccgaacggtacgacccttaagggcggctatgcggtgtctggtgccaacgcgattgacagtgtggtctacaacgtgtgggctgaaggtttcactgagattatcaacttcggttctgacgtacctccggcgactcctagctgtcacaacctccacgcttgggacatcgtgagcgttaaacctaacgactacgagacgtactactctgctggattcattgcgaactccaccatgtgcaccattcgtggctttaagcagctcaagccgattgctgatggttctcctcgtggttccggggcatccctgaactacaccgaggactgtggattctatgacttccacatcccgagtctgggacgtacggcttcctctgagggtatcctcgtgaacaactctaagggcgctgtggtccataacgtgaccattggtaacgctaagactggcgtagcggaatactacacgactggtgctggtatcttctacgataggacccgtcctaacgtgttctctaatatccacgctaacaactgtgataacgctgtggccctgcgctctaagttctccgtatggaaggacattacgcagaccaactgtacctatcacgtgtactttgggaccaccaacgctcaggcgtgtgacgttaagttcgtaccggactccttaggtttcggtaacaacgttgacggtcttgcgcgtatccgtgacaacaaagtggctggttatcgggaacgtagcgtgtaccttcgctctattggttaccttgtggaagacaaagcgtctctgcgtagctgggaccttaatcgcaccatgaagctagaggatggcgtagggtgtcacattctgtatccggtacctccgtacatgcgagccatcttgagcgttaaccagaagttcacctttgaggtaaactcgcaggccaagggctccaaggtgacggtgcaggttcgacgtctggcaaccttcagtggtaactctaacgagtccccggtgattgagtttgagaactctcgtacagcgtctgtgaacagcgttcaggatactgacgtccagaccaacgcgcctcgactggtggtcaactccccggatgacggcatcccgaactctatggatgtccttgtgaccgtggagaatccagcagttaacatgaacatcaaagaggcacgtatcgtgtatctcggcgactaacaataaggagactaaatgttactcaatgaactgaaccaacctcgtggggccactattggcctccttaacgatggtcgtactgtgcaggaagcaatcgacgagattgagactatcaagacccgtaacgtggaccctgagcgattccgtgagactatgacgtcaagtgacgacgatgtattcgctaagatgttcgcttggttagccactcagactgacgtagtggggacctcagagtcctcctacatctcagctctgccacgcatgattgacctgtctgggcgtacctatacgctcaccaaggttcaccaactggacggcaacttcgggattcagaatggtaccatcttcatgaaggaccaaggggaaatccttatgggtctggactctggtaccaagactcgtcgtcacttccttaagtatgtacattttgagtacattggggacgctgaccgtacacagtctctggtgaccatggctcgatgcttcaactctgtggtgctgttctgtaacttcattgcaggtggtgatactgcccgtaatcgcactccgcgtactcgctatggcctgttcgctggctctacccgttgctggggcttccagttaatcggtggtgagtattacggtggcgactgtgcgttacgtgtaggccgcgctaatgaccacactgggttgaccattcgtcccggtacggttcaccactctcgcgtcatcaacatgatgctatgtaaccccgctggtgccgaagtgtctggctgtaacattgaacacgcagacaacggtgcgattggcttagggattacctcaggtaccaacacctccggtaacgcagcccacggtgttcgtatcaacggtgtgtacttctacaacaacggtaacggctctagcggctccaacgttgctccagccaacatcctcatcgggaaggacattccgggaactgagggttgggaccgtgaaggtcttccgattacctccagtaagaacactgcgcacagtattacggtatctgagtgctacatcgttagcccgaacacccagaacgcttggcaggtgaacgccctctacggtgtaaactttgtggataacaaggtgggccttaaaggcgacgctacgattcacggtgtctacgatgggacctgtgccaactgctggacttacggtaaccgtgaccaaggcggtaagaccttccagttctcctctacggcgaccaaccagattctgactacccgtaagggcaagtggactccgaagctcatcggtgagacctccgcaggtaacaccaccctgagtgctggtggcggtgcgtactctctggataacgggatggtgaccgtaacgtgtttcgccgttgtgggtgaacgtgatgacgccatgcagggtaacatcaacattaagttgccgtttgcgtgtgaggaccagcagcgtggtggtaacggaatctccctgacgaacgtcccggatgtttccaacccggtgggcagtgttatcgttattggtgacacggctcgaatcatgctgggctctgcccgactgcaacacaccaacgttactggtggtaccgcgattcacttcagcgtttcctacccggtagacgtgaaagtataaggaggaccgatgctgtctttagacttcaacaacgaggtcgtgaaggcagctcctattgtggggacaggtgtagccgatggtgctgcccgtctcttctgggggcttagccttaatgagtggttctatgtagccgctattgcctacacagtggctcagattggtgccaaggtagtgcagaccattatcgactggaagaaatcgaataaggagggttaagatggacttgaagaagttccttgagatgctcgatacgaacatggcgcagcagatgcttgctgaccttgctatgccggagaagtgtacgccacagctctacaacgcaatcggcaaactcttggaccgccataagttccaaatctctaagattcaacctgacgtcaacatccttggtggactggctgactctctggaggagtataataagcgtgtaagtcccgatggtctatcggatgacgacatctacacgattcagtaacatactcaaggtactactatatgtggtgcctttatggatgttattgcactacgcgaggcgtccctacgtgaaatctacgaaacagcgggaggcattatgctggaattttcaaagagaatcgtcccgtatcttgtggttatcatggtgttcgccttcgggtggcactttgggtcacaatctatggacggcaagtggaaggaggtagtacacaatgagtatgtacagaaagttgaagctacagcggctactagcaaagcggtcgcagcgattagcgccaagtaccaagcggacctcgaagggcttgaaggcagcactgataggattattgatgatttgcgtaagcgcaaccagcgcctgcaagtcctcatcaagcctaccaccggaaccccaacaggtgacggtagatgcatcgttgatggtccagtcgaactacacgaagcaacttctcgacgtcttgtcgaaataacgcagaaggccgacctaaaggagcgagcgcttcaagacacaatcagaaaactacaaggagggactaaatgagcgactcgcagaatgcgcgtaacgctctcattgtggcacaactgaagggcgactttgttgcctttctttttgtcctctggaaagcgttgaacctaccgccacctaccaagtgtcagattgacatggctaaatgcctcgctgacccgagtaacaagaagtttatccttcaggctttccgtggtatcgggaagtcattcatcacgtgtgcgttcgttgtgtggaccctgtggaaagaccctcagttaaagattctgattgtctctgcatccaaggaacgtgctgacgctaactccatcttcatcaagaacatcatcgacctgctaccgttcctcgccgagcttaagcctcgacaggggcagcgtgactctgtgattagctttgatgttggccctgcccgacctgaccactctccttcggttaaatccgtaggtatcactggtcagttaactggtagtcgtgccgatatcatcattgcggatgacgttgaggtacccggtaactccgccactcagtcggcccgtgagaagctctggacgctggtccaagagttcgccgcactgttgaaacctctggacacctctcgtgttatctatctgggaacccctcagaccgagatgaccctgtaccgagagcttgaggaaaaccgtggctacacgaccatcatttggcctgctcagtacccaaggactcgtgaagaggatatgtattacggtgagcgcatggccccgatgctgcgtgaagagtacaacgagggctttgagattcttgctggtcaacctaccgacccggtacgattcgacagcgaggacctccgagagcgtgagcttgagtacggtaaagctggctacacgttacagttcatgcttaacccgaacctcagtgatgccgagaagtaccctctacgcctccgtgacgctatcgtgtgcggtgttgacagtgagaaggccccgatgcattaccagtggcttccgaaccgtcagaacctcaatgaggagcttcctaacgttggccttaagggtgatgattaccatagctatcataccgcctcaagtaactacgggttgtaccaagagaagattcttgtggtggacccgagtgggcgaggtaaggatgaaactggttggtgtgtcctgtacacgcttaacggctacatctacctgatggacgctggtggtacccgaggttacgaagagaagtcccttgagttcctcgctaagaaagccaagcagtggggcgtacagaccgttgtgttcgaatctaacttcggtgacggtatgttcggtaaggtattcgccccggtcctcctgaagcaccacaaggcggctctcgaagagattcgtgcacgtggtcagaaagaactccgaatctgcgataccctcgagcctgtcatggcgagccatcgtctggtcatccgcgatgaggtcattaggagtgactatcagaccgctcgtgacgttgacggtaagcatgccctgaagtacagcctgatgtaccagctcacccgtatgactcgtgagagaggcgctgtggcccacgatgaccgtctggatgccttagcgttgggcgttgagttcctgcgtaaccacatggagcttaacagccaagtagccgaacaagagggtcttctggagttccttgaggagcacatggagaaacctttggttggcggagagtctctcatggagatgacctacggtggcgtgacgattggctgggaagatgacgacatgagcatcggaacgttcattgaatggtaatgcattaagagtgcataaggaagcattatgaccacggaaggtcacgtttagagaaacctaatgaaatcaggcatttaagcaaacgactcactataggacagagaggggacttaaagcattattatagatactttaagtattcattcagtcaccctaaagtgcataagatgaccctagagtatggtgattcttatcatcagataatcacctaactaatagacaacctaaggaggacactcgtgttcaagctactagttacgctactgagacaccgagtgacctataggtttcttctggtacttgctggtgcctgtggtgcttcattggtcactcaacagcaactcagtggattggagactctcctgtgcactgtactcacttgtagcgattagaatcctgctagacccgtaaagactcaacgcagagtgattccgtggatatgattatcatcatacaccactccatcactgtagagtcaatacctaaagtataaccttaagactcacctgtaggctacaggagggtctctacgggtctctcccgaggtctacctttagtaggccgtgtaccattagtgataccattagaacctcatagagggccttatagaggcctttaagaatataccacaaaagtctgagagcatatctcatagtttaactttgagtaactccccccggtaccccttaagtatcccattagagagggtacccctgtggataactttaggatacctgtggataactcaaggacaacct

SEQ ID NO: 17 - DNA, 40575 bp, Unknown
  source: /note="Description of Unknown: KP3W-P0203 Bacteriophage sequence"
ggttacctgtgggtaactttgggtgttcctgtgttcctatctgttagtcactctcaaggtatcacctaaggtaaccactcaaggactcactataggcgaccattagtcatcaccatttgtagcgctatctattagcatgctgtgagagaccattagcagaccattagatgacacgttgtctcgacctgttgttgctatcgtttagcagtgactgatagtaggtcacaaaggttaatcacttctactctcgtttagcagtctcggagagtgaggagacataaggaataacaggtgagccattactataggtattatccttatgccttgtcaatagtctgtatcatcattcctggtcatcacctctttagagtccacttaaagataatcataaattaatttaaaatagttgttgacaagggttaggaccatagatattatagctctcgttccagcaacaacgggacacgaggtgatacctcactgctctttaacaatctggactacagcaaacagtgtctaccgcgagacgggcctgacaggcgacacacaagcgtgacctaacattaggtaactcacaaagctcatggtgctcacacacatttagtaagtaactcatggtcattcatatggtctctgactggcgttgactcagtcaccctttgagtgaccattacgatactcactaacacctacaatcaataggataaacatcatgatttacactaaagagccagccaacaaagtattcgtattcgttaccgcttatcgtggctatgagtcacacgaagttaacgggaagatgcttaatggtctcatcaagactatccgcacctatccgggagcctacggtaatatccgtgatgagaacgtcactgggtgctttaaagaggctggtatgcctgaggctaccacagagcgaacacttaaggtcgaatgcactgagaagcaagccgctgagttaacgtggttagcgtgtcgtgtgtacaatcaagacgctgtactggtggtatactcacagactcacacagcacacttatggtctatcacatcggtgggcgagtatccgcaatcattcccgatgctcaaagaggatgcattaggtggtacgctccaacctgtggatgcgcctaaaggtgaatgctactcgattatcaacggtcaatactgggaggttgtttaatggatgtcacctacggtctcactcagacagacattaagcactatcgctggcttctctcgttaggtaaaccacacgattacctgatgattcacttagcacagacttatcgaacacgaaaggtaatgtatgacaatggcgctcgcagtcataatgattctggggtactcccttatcctcacagtgttcctcagagacttccgcaagggtcttaaggtacacaaagcaacatttagttatatgaagtggggcgtactgcctcgctttaccgtaagagagcgtaatgggcgcttcaaggcaaacaaagtaggaatattctatgtcgcaacgcactaacctgaagaaagcatttaagatagcacgtatggtaatggcctacggcgcatctgtgagaaagacaaaacgagcccttatacgtaacgctaacaggctacctgctcgccaacgccaatgggtaatagagcaggtatacgatgagatttaccacccttggacgtcaccgtacgtaatattgaccgagtcaatgaaagctagaggtgttatatgagcattgataccaaagtgtacgctaacccagacattaaggactttgtagtccacataccgagcatagacaagtacgtctgggcgtcttcccagatggataccatacttcaaggtgagtacatgcgcaccgcattgttacaccgctggaagcacataggcaacaacctgaagttcaccgactgattaacattaaggacacgtaaccaaatgaatacctctatcgcagcaaacgtaattcactcactggactctaagcagtctctgggaatcctgatgttcgaggagtccttgggcgtagttgagggaatcctcatgaactcaaaggaactggaagctatctctaacaaggtacgcgaggaactcattaagaacgcaatggtagtctacggcgactaatcgccaccctaacccaccacaaggaacacaatatgtctctcatgaactccatcgaacgcaacgatttcagtgacatcgaactcgcggcaatcccttacaacatcctcagcgagcactacggggcggcccttgcgaaagaacagttagcccttgagcatgaagcttatgagttaggcgagcagcgcttccttaagacctttgagcgccagatgaagaacggcgaactggctgacaacgctgctgctaaacctctggtgctcactctgttacccaagctggtcactcgtgtgaatgaatggcgtcacgatgaggtgtacgagctgaatgctgatggtgagtacgtcaagaagggcggtaagaagaaacgcgcgttttacctactggagccactgagcgctgaggctatcgcactggcgaccattaagactatcctctcgtcactaaccgctaccaatgagacatccattcaggccgctgcaagtgcactcggtcgggctcttgaggacgaagcccgtttcggtcgtatccgtgacctcgaagagaagcactacaagaagcacgttaaggaccaattagataagcgtgttggtaccgtgtacaaaaaggcatttcttcaggtggtagaagaggacatgctcagcaagggccttatgggtggtcaggcgtgggaaagctggacaaaacaggattccattcacgctggtgttcgctgcattgagatgctcattgaggccaccggaatggttgagctacagcgccagaatgcaggcatcgcgggtcttgatagcgagagcttacaactcactaaagagtacgctgacctgattaccaaacgcgctggagcactggcgggtatcagcccaatgttccaaccttgtgtagtccctccgaaaccttggacggaaattactggcggtggctactgggcgaatggtcgccgtccactggcgctggtacgtacccacggtaagaaggtcctcatgcgctatcaggacgtgtacatgcctgaggtgtacaaggctatcaacattgcgcagtcaacgccttggaagattaaccagaaggtgctgaaggtagccaacgagattgtcaactggaagaactgcccggtcgaggacatcccggcaaccgagcgcaaggaacttccggtcaaacctgaggacatcgacaccaaccctgaagcactgaaggcgtggaagaaagctgcatcgaccatctaccgcaacgataaggctcgcgtgtctcgtcgaatctctatggaattcatgctggcacaggccaataagttcgccaacaagaaggctatttggtttccgtacaatatggactggcgcggacgtgtctatgcggtaccaatgttcaatcctcagggcaatgacctcactaaaggactcctgacgctggctaaaggtaagccgattggtcttgacggcctgtactggctgaagattcacggtgcgaactgtgcaggtgtcgataaggtcccattccctgagcgcatcaagttcattgaagacaaccacgacaacatcatgcaatcagcagccaaccctatcgagttcgattggtgggccaagcaagattcaccgttctgcttcttagcgttctgctttgagtacgcaggtgttgagcatcacggcttgaactacaactgctcgctaccgctggcgttcgatgggtcctgctctgggattcagcacttctccgcgatgcttcgtgatgagattggtggacgtgcggtcaacctgttgccgtctactgaagtacaggacatctatcgcatcgttgccgataaggttaacgagattcttaaggttgacgctgtgaacggtaccgctaacgaagtggaactgattaccgataagaccactggagaaatcaaagagcgcctgaaggtaggtacctcagtgatggcccaagagtggctagcgttcggtgttacccgcaaggtaaccaaacgttccgttatgacactggcctacgggtccaaagagtttggcttccgtcagcaaatccttgacgacactgtgcaacctgcaatcgacaacgggtacactggattcaccaacggtaaccaatcggctggctacatggctaagctgatttggaacgctgtaagtgttaccgtagtggctgctgtagaggctatgaactggctcaagagcgccgctaagctgctggctgctgaggtcaaggacaagaagaccaaagaggtcctacgtgctcgctgtgcggtacattgggtaactcctgatggtttccctgtgtggcaggaataccgcaagccaattcaggtccgcttaaacatgatgtttctcggtcagttccgcttgcagccaaccgttaatactcacaaggattccggtatcgacgcccacaagcaagagtctggtatcgctccgaactttgtgcactcacaggacggcaaccacttaagggcgaccgtagtacacgcccatgagaagtacggtatcgagtcttttgcactcatccatgactcctttggtaccatccctgctgacgcagcgaatctctttaaggcagtccgagagacgatggtcgagacgtacgagtctaacgatgtactcgcagacttctacgaacagttcgcagaccagttgcacgagagccagcttgaagatatgccagagctacctaagactggtaagcttgaccttcaagacatccttaagtcagacttcgcgtttgcttaagtaaatcatgcagttagcgagtcgttggttgaactttgagctaacgactcactattagagaatacttaaagtggtcttaaagattacttagagtgtttattagagatttaaattaaagatatttaacttaaagataacttaaaggtaaacattatgattatcatgctcagcgcctcactcgtattcgcagcactggccttagctatatcctcaagcaagcttaaagcactaatggaccacaacaagcaactctccgagagggtgctaagagctaaccgagatgtgacctattacaccaagtacgcagagcgtaggaccgaagaggtgagctcattgcagcacaggcttaacgacgtatcgtatcaacgagacgtctccgtcatgaacgccaagaagatgtttgagcacaacattgagttagcccgtcgaatctcggagctcgaagagaactcccttgagaactcctcattgctgcacattaagttctccgcacgtatgcctaacggcgacatcgagaagaccactttcaagcttggagttggtccttgtgggctcactgtgaaggcccttaagtggaccgagtacgatgaccattacatccttgagcagctctgtactaacggagagattaagcgcttcaagtatgaccgggcggacgtccttggacgtatcgaacagcgcctcaagtagcaaacgactcactactagggagaccattacggtttcccttttcgcacatctatcatctggagatttaaacgctatgaacgcacgtatcaactttgagaagaccgtccgcaccgaacgcaaccgcgaagcacaggcttatgaggagtttgtgggccgcaagggtaagtacaataagactaagcgcggtggtggcgttaagggctccttccgttcccttgagcagtcacaggtcaaccaagagaaatactttgtaggagcttgatgtaatggcgattaatggggactatttatttgacggaaacactagccaatggtctagattaggatacgcagagcggagactattagatgaaaccgggctgacagtcatcatgcaccacgatatgctcagggattgcgttgtcttatcggtgtacgagcctaaaggtgacgtgctgatagagaagtcctttagtcactggtcgattgactcagcgtctgactggctggctaaactctgcaacgattacgcaagctggcgctaacgactcactactaggaacacctagcgttaaactcaaggtcatctacacaggtggccttcatgattaacactaactatcggagattgaacatcatgcaaccttttgcaaccaaaccgtataaagctgtaagtttcgtagagtcttccgtggagaaggcactcgaacgtgctggctacctcatcgcagacactaagcacgatggagtccgtgggaatatcgttgtggataacacagcagattccctatggctgtctcgcgtaggcaagaccatcccggcccttgagcacctaaatgggttcgataagcgctggcagaagttactacaggatgaccgttggattttcccggatggctttatgctggatggagaactaatggtcaaaggcgtagacttcaacactgggtctggtctactgcgcacccaatggatgaagcagagcaactacatgttctctacttgtgaatactggcacgatgagtgggcgaagaaggctaaccgccaaccgttccacttggacccatatcagctaaaagttgtcctttacgacatcgttccgctggacgttatcgaatccggtaacgactacgaagtcatgacactgctccgcttagagcacgtcaagattatcctcccgattcttcgcgaacacttcccggaaatcgaatggtgcctctctgagtctcatgaagtttacgacatgaccgaactcaatgcactgtacgaatccaagcgagccgaagggcacgaggggcttgtcgttaaggacccaatggatatctataagcgcggtaagaagactggctggtggaagatgaaacctgagaacgatgctgatggcgttgtagtgggtctcgtatggggcactagaggtctatccaacgaaggcaaggtgattggctttgaggtcctccttgagagcggacgggtggtcaccgctacgaacatctcacaggaactcatggatgaactcacagagaatgttaaacgcatctcattagactcaacaggcttcttcctgccctatggattaggtgagaacggcccacacttcgttaacccttatgatggctggcaatgccagattaactacatggaggaaactccagacgggtctttacgtcacccatcgttcgacaagtggcgtggtaccgagagcgaccctaccgttaagatttagctaacgactcactaataggaacaaccaacccggagacaacattatgatgaccattaacgtcacactaatcgttgtcttcctgatagccgcctttgcgtggactatcggggacgacgacaacactaacggaccgaaaggagcttaacgaatgcgtctacattacaacaaatcaaacggaatctactcggttcgccgggttgaccgtagcaccgtagcggctactgaacgtcacggcaagttacctcgcatgttcgacaccttcgagctagcgcccagcgtccacatcattgttactcgcggtctctacgaagcagcggctgaaaagtccagacctttcgtacccgtggtggtcactaagtggcctaacgtgcgtggattttttatgcgtgtcaaggagattatcaatgactaatggagaacgtactgtaatccatgagattatcactatgaacgaaggtcggccagattccctgaggtgcggtcaagcggttacgtgttcaggaatctcctgtagtagctgcccgctcaacgacagtggagcaactcttggttacgttcgcgctttggatagccgagatatagtcacggtgagtaaacctgacgatggcgttaaacagccaagtcattaccaactgttcgaaggcgtagaggctatcgaggtgattgctcgcagcatgacccaacagatgttcaaagggtactgcctcgggaacatcctcaagtaccgcctacgggccgggaagaagtccgagatggcaaccttagagaaggacatggcaaaggctgagttctacactgagttgtacgaaaagcacaaggcgctgtgttatgacgccaagtgagtggtgcgaacgtaaattcgaggagaccgggaacaccgattacctcgaaatgtataacctttggaaacagagaggaatgtagcatgagtgcgcataaaaccgtaatagccatggtgttcacagacgcgaactgtgggtttgccgaccttgagtggttatcgtatccagatgggtctgttaaggttcatcgattaggtagcaggcattatcacgaatcggcgctaacacacagtgagttacacaacgtttcacacttcagatttaaggagctacgcgatgtcccagcaatttaaagtaaccgtagaaggcgctacaatgtccgtagagttacccattgaggccaactctctggaacacgcactggaactggcggaagccgagtatgagtctatcggtgtggtcacacgggttcgacctgtggtcgcctccgagtaagacctaacgactcactaatagggaatacttcccgagacctaatccacacacaaaggagaaacacacaatggcagtaatcgcacgtaacaaaatagtaacctctggtgtcggtacagttgagccgtacgcctacctaaccaagccggattacggtaacgaagagaaaggcttcggtaaccctcgtggtgtctacaaggcaagcttaacgttgccaaacactgacccaatgtgtcagcgcatggtgcaagacatcgtggatacccatgaggctcactacgcagagcgcgtggctgagtacaacgagaacccgcctcaggtgcagcgcggtaagaagcctcttcttccgtacgaaggtgacctgccgttcatcgacaacggtgacggtactactacctttaagtattcttgctatgcgtcctatcaggacaagaagaccaaagagacccgccacatcaacgtaatgattgtggactctaaaggcaagaagattactggtgacgcggttccgctgttcatcggtggcggctctaagattcgcatcaagtacaagctggtgccttactcttggaaccctaccgtgggcgcttccgttaagctgcaaatcgactccttccagttaatcgagctggctacctctggtggcagtgagagcgaatgggacgaagtcgaaggcggctatgaagcacagcatgaagacaacggcggctggtctgagcacgaagagtctggtgcatcctctgacgatgacgaagatttctaatggcaggctatggggccaaagggatacggaaggtgggtgccttccggtctggccttgaggacaaggtgtccaagcagttagagtcaaagggcgtcactttcgattacgaattgtggcgcatcccttacgtgattcctgcaagtgaccacctgtacacccctgacttcctgttgcctaacggcatcttcgtggagactaagggtctctgggagtccgatgaccgcaagaagcacctattgattcgtgagcaacacccggagttagacatccggttggtcttctcttcgagtcgcactaagatttacaaagggtcgcctaccagttacgctgagtggtgcgagaagaacggcattaagtttgccgataagttaatacctgtggactggttgaaggagcctaagcgttctgtaccgttcgacaggttcaagcagaagaaaggagtcaagaagtaatcatggctaaagttcaattcaaaccacgaaaggagacctctcagattttcgttcactgttcagccaccaaggcgaccatggacataggtgtccgtgagattcgtcagtggcacaaagagcagggctggctggacatcgggtatcactttgtgattcgtcgtgacggtacgattgagactggtcgtgaccttggggccgttgggtctcacgttaagggctacaacgagacctctgtaggtgtctgtctggtgggcggtatcgacgctaaaggtaacccagaggcaaacttcacgcctgagcagatgcactcgttacagaacgtcctgaccacgctgaagggcgaatggcctaacgctgtgattatggcgcaccatgacgttgcacctaaggcatgcccaagcttcaacctgtctcactggctgaagactggcgagctggtcacgagcgaccggggctaacaactcactatagggattacataacgtagtccctgttgtcgcacatttactcaaactatggtcaggctaaggtgcacttggcgtagcgctgcgtttcatcagggttcgattccctgactgaccacctatcacttatggagattactttatgcgcaagttagaagatgcattcgttgtcattgtaatggggtgtgtggcgttgagcacattaacgctaacaggcgtactcgtagtttccctgctacgcaagtttatactcctatgagttacggggacgctatcgaggatggtcaggagagcatcttcctgttccatgcaccatgcgaaaactgtggttcttctgatggtaactctgtgtactctgatggacacgagtggtgctttgtgtgtcagcacagggtcccggcctcagatgaacgcgagaagaagttatcatcaagaagacccagaggagggaaaacagagatgacacaaggtggtaacgcagtgttagactttggtgccaatgagggtcggtacgtagacctgacggcccgaggtatctctaaggcaacatgccagaaagctggctactggattgccaagcgcggaggcatcacgtatcaggtggctgactaccgtgaccagaatggttcaatcgtctcccagaaactccgggataaagacaagaacttctctacccgagggtctcacaaaggcgatgcgctgttcggtaagcacctttggaatggcggtaagaagattgttgtcactgaaggtgaaatcgatatgctcaccgtgatgcaacttcaggataacaagtggcctgtcgtgtctataggacacggagcgtcagccgctaagaagacatgtagtgcaaactttgaatacttcgattcgttcgaccagattatccttatgttcgacatggatgagccgggtcgtgcagccattgaggaagccgctcaggttctccctcctggtaaggtacacgttgcggtactgaccgagaaggatgccaacgagtgcttactcaaaggcaagggtaaggaggtactcgaccagatttggaatgcagcaccttgggtacccgatggggtagtcggtgtgatgtccatgaaggaccgtgtacgtgaggccatgaccagcgagcagagcgtaggttacttgttctctgggtgtgcagagctcaacacgaggaccttaggtatccgtggaggtgaagtcgtaatggtcacctcaggttccggcatgggtaaatcaacgttcgtccgtcagcaactattaggtttcgcaagggaccaagggcttaaggttggagctgcgatgcttgaggagtccgtagaggaaaccgtagaggacatcctcgggatagccaacggtgtccgacttagacagcaacctaaggagttcaaacagaaacttatcgaagacggtacgtacgataagtggttcgatgagctctacagcagcgaccagttccatctttatgattcctttgcggaagctgaagtggaccgactgcttgcaaagctacactacatgcgcacaggtctcggctgtgacgttatcgttctggaccacatctcaatcgttgtgtctgcctcagaggaatccgatgagcgcaagatgattgaccgcttaatgacgaagctcaaagggttcgctaagtctaccggggtggcccttattgttatttgtcacctgaagaacccggagaaaggtaaagcccatgaagaaggacgtgctgtttccattactgacctgcgtgggagtgggagcctccgccagctctctgatactatcattgccttggagcgaaaccagcaaggtgatatgcctaatcttgtcctcatccgtattctcaagtgtcgctttaatggtattggtgtcggcattgcagggtacatggagtacaacgaaaagactggactcctcgaaccgtctagctacactggcggagaaggagaagaaaatactggctgggaagacccagacgacgactattaacaaccaataggagaaccatcatgattaaacttatcgaagctctgggccgtttagtggtccgcctgtacatcaacaaggcaaaacatcacgaccgcacagctaaggctgacgcaaaggtcgctgagaaactggtagcaggcgctcaacgtgcgcttgaagcatccaaagagaataccgcagaggccgcgaagtttgcagccaaggctcagaaacttaaggagttcttctaatgaccagtaaagtatcgacaactatccgcctgtccgacacggttgaccaatggtctcgccgggtccacgtcaacgtccgtaaccaaaaggtcaccacagtgtaccgctggaagtccaaagacggtcgtgaccacactcagcgcattaccctgaatgatgaccaaacggctcgcctgttgggagcgctgattaatgcgcaatctaaagtgctgttaggtgatgagcctcgcaccaaggcattcggggagagcctaagcaatctgctccagtgataaactcaaggtcatcctaacgggtggcctttatgattattactgattgacaactacggagaaaatacaccatgaaatacaccatgcgtaaacctgaagaaattcgtgcggacatcgacaagcttgtcaaagagttggagactgttaagctttacgaagccaagcgggacgcagcgtgtcacattctcatcaacttagggtggacctatagtcctcagaagggctggaagaagccggagccgctgcataattggaaagagttcgataaggactcaatgacacacattaaggctggtgattgggtacttatcgacgcactggtcccgacactaggtggtgtcgttaagtgtggtgcattcgtgcgggtggtaagtggcacccgagtgattgtgtcgccgattattggtgtaagcaccagaggcgctcacgtttccgacatccgtgttgagcttacgcctcgaagctgtaccgtgactaccatgaaggcggcggcagagcttccgtttcaacgataaccattaaggagggcatcaatgctcgtatccgatatcgaagcagacaaccttttagaacacgtaacgcagttccactgtggggtcatctacgactacagtacggaagagtacgtatcgtatcgcccttgggacttctcatcgtatctcgatgcgttagaagctgaggtggctcgtggtggacttatcgccttccacaacggtcacaagtacgatgccccggcgttgaccaaactggctaagctacagttaaaccgagagtttcacctgccgcgcgagaacgtgatagacaccttggtcctcagtcgtttgcagtacgcgaacattaaggacaccgatatgggcctgctgcgttccggtaagttacccggtaagcgattcgggtcacacgctctggaagcatggggctaccgtctcggtgagatgaaaggtgagtacaaggatgacttcaagaaactccttgaagaacaaggcgaggagtacacaccgggtctcgaatggaagtccttcaacgaaccgatgatggcgtataacgtccaagacgttgtggtcactaaggcactcttagagaagctactgagtgaccatcactacttccctcctgaggctggttgtggggataactggtggatgcacgacgctgtgacattctggaagtattcctgtgaggccgtatggctggaacaccgggctgcttggctactcgctaagcaggaacgcaacggattcccgtttgacacgaaggccattgaggcactttacgttgaactggcaggtcgtcgttcggaactccttcagcagcttactgagacctttgggacttggtatcagccgaaaggtggcactgagccgttcctccacccgcgcaccgggaagccactccataagtatccgagagtgaagaccccaaagcagggtggtgtctacaagaagccgaagaacaaagcgcaacgcgagggtctggaaccgtgtgagctcgatacgagagactacatggctggcgctccgtacacaccagtagagcacgttgtgttcaacccaagtagccgtgaccacattgcactgaaacttcaagaggccggatgggtacctacggaatttaccgaaaagggagcacctaaggttgacgatgaggtcctcgagcacgttcgtgtagatgaccctgagaagcagaagtgtatcgacctcattaaagagtacctgatgattcagaagcgaatcggtcaggcggctgagggagacaaggcgtggttacgttacgtagcagaggatggtaaaattcatggcagtgttaatccgaatggtgcggttacaggccgcgcaacgcacagcttccctaacctcggtcaagtgccgggtgtgcgaagtccttacggtgagccttgccgcgctgcttttggtgctgagcatcatcttgacggcatcactggcgtaccttgggtacaggctggcatcgacgcctctggtcttgaattgcgatgcctcgcacacttcatgtcaaagtacgacgggggagattatgcagacgttattcttaacggggacatccacacagtaaaccaacaggcggctgagctaccaactcgcgataacgccaagaccttcatctacggtttcctctatggtgctggagacgaaaagattggacagattgtgggagcaggtaaggaacgcggaaaggaactcaagaagaaattccttgagaacactccagcaatcgcagcgttgcgtgaaggaatccagcagaccctcgtcgagtcatccaaatgggttggcggagagcagcacgtcaagtggaagcgtcgttggattaaaggacttgatggtcgcaaggtacacgtcaggtcaccacatgcagcccttaacactctccttcagtcagcgggggcgctcatttgtaaactttggattgtcgagactgaagagttacttctcaaggcaggcttaaagcatggctgggatggtgactttgcgtacatggcgtgggtccatgacgaaatacaagtgggttgccgtacaccagagattgcacaacaggtaatcgacattgcgcagcaggctatgcgtaacgttggggaccactttaagttccgttgccgtctggacacagagggtaagatgggtcctaactgggccgtatgtcactaataacataggagatttaaacatggcgatgaccaaacgtttcaaagttactttcgaagtaaccaccgtggtggactctgagtccgagaagaaccttcgtgataccgttctctcaattgctcgcagcgtgaccaaaggtgagaaggtgagtccattcaagctcggtctattggaagcggcccttgagggaggacctgaagcggctgctgagttctgcatcaagtcaggcctacgctccttcgtcaaggaaggccatgatgacctgtctaagtttgagcagaagctgatgcgattctctccggcaaccgtgagggccatcaagcaatgagtgagtacctaaaagttctggcggccctcaagggctgccctaagtccttccagtcgaactacgtacggaacaacgctgcgttagtcgctgaggctgcgagccgtggtcacatttcgtgcctgaccatgagtggtcgtaatggtggtgcttgggaaattacaagtgccggagtgaaattccttaagacccatggaggttgtttatgagtaagttatcagctaatgtcaaggaatacgttaaggagcttggtaggcgttacaccgagcaccgtaagtattcccagttcttccttacgatttccctgaaggttaccgagagtgatgctaagtgcgaagaggagcttcgcccttacgttggtaaagagattgtcgctaccggaatgtgggacgatacttggggcgatgagattcacgactggcgagtgttctctatagaaacctcagaggaagacactgaggtacgctcagagttccgtgagctactttcacacctcaacgctgaggagaacagtatggcccttgacttccttgagaagcaccttaagccgaaactggtggaggagcgcgtggaggtttaccatgagtaagcacactttgttatccttcagtgacttccgggcaacccagcctaagtccaaaggcgtccttgtgatggatggcgactggatggtctttcaggccatgagtgctgctgagtttgatgcttcgtgggaagaggagatttggcatcgttgctgtgaccacgctaaggcttggggtatcctccagcagtccattgaatcctacaagtcccgtaaaaaggcttggaagaatgctgacgtagtcctagcgttcaccgaccgtgtaaactggcgcaagctgttggttgacccaacgtacaaaaagaatcgcgccgtctctaagaagcctgtgggttactttgagttccttgcgcgagtatgggatgagtacacaagcatccttgagccgcgactggagggagatgacgtgatgggaatcatcgggtctaaccctctggtctacggttacgacaaggctgtccttgtgtcctgcgataaggacttcaagaccatccccgattgtgacttcctgtggtgcactactggtaacatcctcgtgcagacccaagagaccgctgactggtggcatgcataccagatggttaagggcgacatgacggatggttacggcggaattccgggctggggtgataccgctgaaggtttcctcaacgaacctcacattgtggagcctgtggtgtccgtactgaagtccggtaagaacaagggccaagaggttaccaaatgggtgaaacgttcccctgagcccggagagacgctctgggattgcattaagtccatcggtgcgaaagccgggatggaacctgaggacatcattaagcagggccagatggctcgcatcctgaggtctgacgagtacaacattgaaacaggagagattactttatgggacccgtctctgtcggagaagctgctgctgtcatccttatcgtaggaccgattgcgcggttactgtgggtgctggcgtaccatagccgtaagtcactgaaagacaacacgaagtagtatgttcgagtgtacaccttccgttaccgtgtgagctaacgactcactataggggagatgtatactctatagatattactttaagattactttaagaggagcatcttatgttacgagaaatcacgaatactctggataacccttcagacatcccagctatctctaagtcggctatcagctacctccagtctcgctttaacgcagactacgtggcggcatccggtgagatggacactctgaagactaagggttacagcgaggcggtaatccttgggttcatcatgggtctgcaacacgctacgtccgttctggatgacatggagtacattcgtagtttacctaaagaggagtgattattatgtgcttcagtccaaagatgaaagcgccaaaggttgacaccgctcaggtagtcccaccagctccactaacggaacagccaactggcgtggtcttcggtggaaacgatgaggacaactcagcggataccacagcgaacgctactggtcgcaagagtgtcaccgttaagaaagacccagcgaaggccacgagtgccactaagtccatcaccaacaaggcgttcaaccaatgattctacaaagagagcaatcaaacgactttacgcgagagttagccaccctgtggacttgggagcgcctgaagacacctaaggggttctgcacgttcgacgaatgggctgaccacgtaaacagcgtcatggacgcctcaggttacagtgagttcatacttagggacccttctaggaacccaagagcggtggcctacttcgcgtgtcaggtcggtcagtgcatccaccatcacggtgacgtgcttgacgttggcttcatggtcatcaacccatccttcaaggacaccagaagtgtctggagggctatcctagcggttgcccgtctgagaggttgctcatggattgcccgtaagcaacaccagccagatgggtccattaaaactatttactcggaggtgaaaatctaatgggtagtatcgtaaagaaaatcactaaggcggctaataagctgactggtggcttgctcggtaaagaccctgcgatgccacaggcagtagccccagagcctgtcgctccggccccggtggaagcacctaaggtcgaacaagtagaggacaactcgactgacactgagtcagacaagaagcgtgtccgggcgactggcaagaagtctcttagcgtatcccgtaactctggcgctggtatcaacgtatgattggttatggggagggctaatagatggctactgtaaaacgtacagggttcggtgaggaatccgcaaaggctgtgtacgaccgtttaaagaacgataggcaaccttacgagactcgtgcagagaactgtgcgcagtacacgattccctcactgttccctaaagactccgacaactcctctacggactacacaactccgtggcaggctgtgggagccagagggctaaacaaccttgcgtccaagctgatgctggcgttgttccctatgcaatcgtggatgaagttaacaatcaacgagtaccaagcggaatcccttgcgggtgaccctgaagtgctcactcagattgacaagggtctctcgaaggtcgagcgaatcctgatgaacttcatcgaaaccaacagttaccgtgtgaccatgtttgaggcccttaagcagctcatcgtggcaggtaacgttctgctgtacatcccggagcctgaaggcccgtacaacccactgaagctgttccggttgaactcctacgtggtacagcgagatgcctacgggaatatcttgcagattgtcacgctggaccaaatcgcgttcggtgcgttacctgaagacctccgctcggaagtcgagaagtccgctggcgataagaaaccagacgacctcgtggacgtgtacactcatatctaccttgacgatgactctggagactacctcaagtacgaggaggtcgaagagattgaggtccaaaagtcagacgctagttaccccgcagatgccttaccgtacattccggtcagaatggttcgccttgacggtgaatcttatggtcgttcttatgtcgaagagtatcttggtgacctgcgctcccttgagaacctccaagaggccatcgttaagttcgctatgattagtgccaaggttatcggtctggtcaacccggcaggtatcactcagcctcgacgtctctcaaaggctcagactggtgactacgttccgggccgtaagagcgacattgagttcctccaactggagaagtctcaggactttaccgtagcgaagaacgtgagtgacgccattgaggctcgccttgcgtatgccttcatgttgaactcagcggtccagcgtacaggtgagcgagtgacagccgaagagattcggtacgttgccagtgaacttgaagcgaccttaggcggagtctattcgattctgtcgcaggagctacagttaccgctggttcgtgtactcctcaagcaactccaagccacccagaagattcctgatttacctcaggaagccgtcgagccagctatcagcacaggtctcgaagcaatcggtcgtggtcaggaccttgagaagctcaaccagttcgtacaggcgctcggtatgttgtctccgctgtctcaggacccggatatcaatatggctaacgtcaagctacgtgtggctaacgctattggtatcgacactacaggtatgctgatggacgacgacatgaagaaccagaagatgggccaagaggctgtccgcgaaggcgctatggcagcagctcaaagtgctggtgcaggtatgggctcagcggctacttcaagtcctgaagctatgcagggagcggctgaccaagtgcaggcagcagcaggttaatagcaaacgactcactatagggagagatggaacattacgtttggtggttgccaatttacgattggacatccggctgccgagcttggcgtaatggtgccctttagtctataacaacatggagaacaatatgtccggtgaatctaacgctgacgtttatgcgtcttttggtgtgaactctgctgtcgtgactggaggtaatccggtagagcacgagcagaacatggttgcgttgaacgtagagactcgtgacggtgatgacctgattgaagctcacgatgagcaacctgaagacctgtacaatatcgaggacaagttcgctgaagaacaagacccgaaccgtatgcaggtccgtatcggcgaagaggcttcagaggatgccaacgctgatgaagcggttgaagagaacgcgggtgaggaagaactgagcgaagacggcgagactcctgaagagttcgtgccgcttggtgatgcccccgcagacctgacggaagtcactcagcaaatcacagagcatgagcagggattccaagagatggtggcggacgccatcaaccgagggatgtctgaagaggacctagcgactatcgaagcggaatacgctggtgatggtattagcgatgcgtcctacgagaagttgaaagccattggttactctaaggcgttcgttgattcgtacatgcgtggtcaagaggcactggtaaaccagtatgtcgctcaggccaaagcgtacgcaggcggtgaggagcgattcaacgctctccatgcgcaccttaagtcaaccaacccagaggccgcaaatgcccttgagactgctttcggcaaccgcgatttgggtaccatgaaggcaatcatcaatctggctggctcctcgttcaccaagaagttcggcaaacctgccgagcgttcggtgactaaacgtgccattccggtgaaacctcaggtcaccaaagcggaaggcttccagacccgtgacgaaatgattaaggcaatgtccgatagtcgttaccgttcggatgctgcgtaccgccgtgaagtcgaacagaaggtaatcaattcggccttctaagagcaaacgactcactatagggagaccgcacaatctgacaaggagcgaaagcatctccctttagttacacattgagaaccaactcgattcaagtagtaacacccactttatctttaattcatgaataggagatttacattatggcagatatgaaaggcggtcagcagattggtactaaccaaggtaaaggtcagagcgcagcagacaaactggcgttgttccttaaagtgttcggtggtgaagtcctgaccgcgttcgctcgtacctctgtgaccactaaccgtcacatgattcgttccatcgctaacggtaagtcctcgcagttcccggttcttggccgcaccaaagcagcctatctgcaaccgggccagtctctggatgacaaacgtaaagacatcaagcacactgagaagaccatcaacatcgatggcctgctgactgctgacgttctgatttacgacatcgaagacgcgatgaaccactacgacgttcgcgctgagtacaccgcacagctgggtgaatctctggcaatggcagcagatggcgctgtactggctgagctggctggtctggttaacctgccgtccaccactgacgagaacattgcgggtctgggcaaaccttcccttctgaccctgcctactatcaccgcagaaacctctgtgactgacgttgagaagtacggtcaggaaatcattgcgatgctgactcaggcacgtgctaagttcaccaagaactacgtcccggcttctgaccgcaccttctactgcaccccggaagcgtactctgcgattctggctgcactgatgccgaacgctgcaaactatgcggctctgattgaccctgagcgtggttctatccgtaacgtcatgggcttcgaagtcgttgaggttccgcacctgactgctggcggtgctggtgatgaccgtgaagacgaaaccactaaccagaagcactccttcccggcaactggtaacgtcaacgttggcaacgtggtcggtgtgttccaacatcgttctgctgttggtaccgttaagctgaaagaccttgcgctggagcgagctcgtcgtcctgaatatcaggctgaccagattatcgccaagtacgctatgggtcacggtcagctccgtccggaagctgctggtgctgtagttttcaaagcagcggcttaagagtagcagcctttagtgcgaccgtagagagtgaagtggagccgaccccagaggtagccgccgaagtagctctcacgcctcaacagaaggccgcaattactcgtgctcgcaacaaggcacttaagtcgtaacgtttagccaaaccccatggggccttcgggtcttgtggggttttttgcttctttaaggagataccaaatgtctaaccttccgtttaccggggaactcgacgccattaacgaaatgttagcggctatcggggaagcccctgttgaaacactggatgacgagaataacgtagacgtggctaacgctcgcagaatcctcaataagattaaccgacagattcaatcgagagtctggacgttcaacctagaggagggcgcaacgttgacacctgatgtcgccactaagttaattccgtacagtccagactatctgtccctgatgaacaacggcggggccagcgtatacgttaaccgccaaggttgggtgtacgataagtcagctaacagtgaccagttcgatggtcctatcgccgtggacatcgtgagactcaaagattacaacgagatgcctgaatgcttccgctcgtggattgtcgctcgggcaagccgccagtttaactctcggttcttcggggctgaggatgttgcacaggacctcgcagaagaagaacaggatgcggcacagcgttgctttgagtacgagctggactacggcaagtataacatgctggacggtgacgccttcgttggtggtctactgagccgataatacagataaggaggacctaatggccctagtaagtcaaagcattaagaatcttaagggtggcatcagtcaacagcctgacatccttagatacccagaccaaggggccgcccaagtcaacgggtggtcctccgagactaatggtctacagaagcgtgtccctacgaccttcattaagggtctcggtggtcaagggttcttcgggccagcgccactggtgcacctgattaaccgagacgagaatgagcgatattacgctgtgttcaccggggatagaatccgtgtgttcgagctggacggtaccgagcgtcaggtccgagggtccttcgagtacgtcacaacgaacaacccaagggatgaccttcggatgattacggtggctgactataccttcatcgtgaacaagtctgtggaggtccgtgagaaccgtggagacttatccacaggcggtaacttcaaggacaacaaaacggcactcattaacgtgcgcggtggtcagtacggtaagctactcaaggtcaacctcaacggtacttgggtggagcaccaattgcctgacggctcagacccgaagcagtcccctcagactgatgcccagaacattgcggctgcactgcgtgataaacttgcggctgcgttcccatcgtggacattcagtgttggtacggggttcgtgtacattgaggcccctgtagacgctaccattgggaccctacagaccgctgacggttacgctgaccagttaatcagcccggtaactcactacgtccagacgttcgctaagctacctctgaatgcgcctgacggttatatcgttaagattgtcggggacacctcaaagactgccgaccagtattacgttaagtacgacgaaaagcagaaggtctggaaggagactatcgggtggaacgtaccgatgatgattgtttacgagtccatgccctatacgttggtccgagcggctgacggcgagtttgacttcggggttcacacttgggacccgcgtaaggcaggcgatgaggataccagtccgatgccttctttcgttggtgggaagattacggacgtattcttctggaggaaccgtttaggattccttagtggtgagaacgtggtgttgtcccgtacagggaaatacttcgacttcttcccaccgtctgtggctaacctgagcgacgatgacccgattgacgtgtccatcagtcataaccgtgtgtcaatccttaagtacgccgtaccattctctgaggagctcctgctgtggtccgacgaggctcagttcgtcatgaacgcttccggggtactctctgcgaagtccgtagagttgaacctgacgactcagttcgatgttcaggatggagcgagaccttatggcatcggtaggaatatctacttcagcgccaagcgagcaacctatagctcaatcaatcggtactacgctgtaggagatgtgagtgaggtgaagaacgccgaggacatcacggcccacgtccctgagtacatccctaacggggtcttcagtatcaacgggtctggcgtggagaactacgcctcagtgttgaccacaggcgcaaagaaccgaatatacctctataaattcctctacgttgatgagcagattgcgcagcgctcttggagccactgggagttccctaaggagaccgaggtgttggcggctgactgtatcggctcaacgatgcacatcatgatgcgtaacgggaccgactgctggctggctaacgctgagttcaccgaggacactctggacgttgacgatgagccttaccgggtacacgtggacattaagaagtcctacacgattcctgaaggcaagttcaacatggataccaacctgactaccctgagccttcgcgagctgtacgatatggacttccctgatgggtggaccatgtcaatcgtagagcctgacggtagactcacagagtacgtcaccggacaacctattgagtacgttggggacctgactggcgttaaggtgaccgtagggtttaactacacgttcctttacgagttctctaagttgctcattaagaagaccgacccggatggttccacctctaccgaggacaatggacgcctccagttgcgtagagcttgggtcaactacaaggactccggtcagttcttcgtgaaggtcaacaacggtagccgcgagtttagctataatgttggttacggtaaggtagggaccactggtgtcaccttaggtaaacctgtattgaaggacgggcagtaccgcttcccgattgcaggaaacgctctgcgtaacgctgtgaccattgagtcttcctctccgacccctttaagtatcattggggctggctgggaaggtaactacgctcggaagtcttcgggcatttaataaccaagtccctatggtgagcaaacgactcactatagggaaccaaacgactctgggagggtttcgttatgttcattaggaaaactgtaagtaatgactttgagttattcaccccggcctaccatgacctacttgaagcgaaggctatggggattgaaccatcgttccctgaggcgtccgagtgtgtcacgttagaccacggtgggttccctctggcgattggcggtaatcatggagaccaagtgtggttcgtaacgagtgaccaagtgtggcgactcgacagagcgctgaaggtcagattccgtaggtgtatatgcgggtatcgcgatgcaatgctcacggtctaccctacgctgtggaacttcgtttacattaataacactccacacataaggttccttaagtccatcggggcggtattccatgaggagtacactcaggatggtaaattccaactattcacaatcactaggaggtaactatgtgctggatggtagcgattccgatggctattgccgccgctgggtccctcatgaagtccaactctgagaacaaagctatcggtgctcagaacgatgccatgcgacgtcaatccatggagcagctgaaggcaaccaacatcgccaacgctgatgacacccttaaggcccgagcggctcttgaggacgcttcaagtgaactctcgacccgtaacctcaacaaggtacaggcgatggggacactccgagcagcaatcggcgagtcaggtcttgagggtaactcaatgtcccgcatcagccgggtcaccgagggtcaatacattcgtgaagccaacagcgtgaccgagagctacaaccgagactacgcgagcatcttcgctggtcaggtaggccgtaccgagtccaccaagtctcagattgaggcgaacaacaaaggcgaactcaaaggtaagtctggtatcgaaacagcacttgatgcgggactgtctgctggcgctgcgtgggctggtagctcagcttcaggtggcctgttagccaagggaggtaagtaatggcaagtaaagtttatagtgctttaggtaacatggcgactcccggaatgtctcgactgagaggcttccaagggcagggctatcaggtggcttctgtcaaacctgaagacacccgccagtgggatggcatcatgcgattcgctgagctggctggtgacgtttaccaaaaggtagaccagaagaacaaagacaaggccgatgagcggtccaacgagattatccgtaagttgactcctgagcaacgtcgagaggccatcaagaatgggaccctgctgtatcaggatgacccttacgcgatgcaggcgttacgctttaagactggtcgtaatgcggccttccagattgacgatgacgtcatgcagaaggttcgcgagggtcagttccgtagtcgccaagagctcgacgaatatcgtcactcccggctacaagaaggtgccaagaagttcgctgaagagttcggccttaacgaggctgatgaagatttccagcgtggcttcaacgataacatcaccgagcgtaacatctctctatatggtacccacgattcgttcctgagtgaccaagctcagaagggtgccttggtgaattccaaggtggaacttaacggtgtcctgaatgacccggacatcctcaggtctcctgatggtgccgagttcttccagaagtacatcgacaacggtcgtatcactggttccattccgtcagactctcaggtctcacagttaatctctgcgtcccttcaggacgttgtacagcgtgagggcggcgctcagttcctgatgaaccttgaagataagaaggtgacccttaacgggaccaccagtaccttcagggaacttctgggagacgagcagtggaacatgatgaaggtgaatgctcagcataccgagttcaccctcaatgctaagcgattcgagaagttctccttgggtatcaacaatgcgttgaaccaagctgacccgtcgaagggctgggagcaacttcaggcaatcaaggagcaactcgacgaaatccaaccgggcgaggagatgacccccgagcgccagcagttaatcaacgctcagcagcagctccagaacacgttcgctcagaagtcagcagctaccgctaaggaactggacaaacagcagaagtccatgaacaaacaacaagttatcgagcagcaattcaacaagcgcctcgctggggaatacgtctccactgcgtttgctgatatgccaaccaacgagaacactggtgagttcacccatagcgatatggtcaactttgcgaacaacaagttgcagcagattgagcagatggacctgacggatgaacagaaggacgccatgaagttgaagtaccttcgggctgactctaaggacggtgccttccgtaccgctgtgggacaaatggtctctgacgctggtaacgaatgggccgctgcgattatcaacgggaaactccctgagaacaccgtagcgatggacaacctgcgacgtatgcgcaataccgaccctgaccttgtggctgcgctgtaccctgacaaggctgacctcttcgtgaccatggacatgatggataagatgggagtcaaccctcagatgctcattgatggcgagaagtaccgccgtacgatgaccaaagagatgcagtatgaggacgataagtcttgggcttccctgaagaacaactctgagtcccctgagctctcccggttgccgtcgagtctggacgctatggcccgtaaggtatacgacgctgtgaagtatcagactggtaactccgacatggctatgcagcaggtcgataagttcctcaaggactccaccacgactttcacctcggatgacgtggacggtagcaccatcggtgttctgcctaagagttcccttcaggtgaccgatgaccctaagagctgggagcaaggtcgtgacattctggacgctgcccgtaagggtatcattcagaccaacccttggattaccaataagcaactgactattgtccaatctggcaacgggttccgcatgattgataccactggtaacgtcaatatctactatgataacgacatccttcgccgtgagtatcagcgaaccactcaagctgccgagcagaaggcacgtgatgaggccattaagaacgccaataagcgagcacctatcgcagccgctacgaaggcccgagaggccgctggtgagcgtgtgagagccaagaagaagaccgtaccgaagttcatctacggaggcggtgagtaaccaacagaaaccataaggaggccctgtggctaaatatgataagtcaattccaagcgcctatgacgctgtgttccaacaagcggctgatgaggccggggtctcctatgacctgctgcgtaaagtagccttcaacgaatcttcattcaaccctaaggccgtctctaagactggccctatgggcatcatgcagttcaccaaagctaccgccaaggccatgggtctgaacgttacaggtgacgataaggatgaccgttacaacccggctctggcaatcccggctgctgctaagcaccttgcgtctctcgttaataagttcaacggggatgaactcaaagccgccttagcgtacaaccaaggcgaaggccctgctggtgctccacagctagaagcatatgaccgtggggacttctccgcgattagccctgaaggtgtgggctacatgcgcaagctgacagacgtagctcgcagtgaccgtaaaggactccttgaggagttcggaggcatcaccccaaaggctaaaggtatccccgctgaggacgcctttgcgggtctccaagcgcagtctaaggtaggcgataccttacctcagtccaccgggttctccattaaggggaccgagcaggaggctcctaacgagtcctttgctaagactttctgggagacccacggtactactctggatgagtacaatcagcgctctacgttcttcgggattggcgatgccaccagtgcagagttacagaactcagcgttgggcgttgcgttccgagcggcccgagtggatgactcatacgatgtcttcaaggacaccatgacgccaaccaaatggaacagcaccacatggtcacaggaagaccttgagcgcatccgtaacgaagtgaagaacccgagctacatcaacgtagtcactggcggttcccctgagaatctggatgctctcatcaagatggctaacgagaactatgaggctgaccgtaaggctggtgacgctggacttggtgccaagctgactgctggtatcatcggtgctggtgttgacccactgagctacgttccgatggttggtgtagccgggaagggacttaaggttgccaacaaggctcttatcgtcggtacccaatcggcgggactaaacgtagtctctgaggggttccgtacgtccatcgcaggtggtgaagcccactacgcggatgctgccttaggtggccttatgttcggttccggcatgtctgtccttggtgacgctatcgctaagggtctcggtcggactgactacaagaatgactttgcgggtcctgcgatgcgcttagaggcccgagagtctaacttcaacgctggcggtgctgacccgacgctgcaccctgtggataacttagagttcaccgggagccgtggggccgtacagttcgctgagcacccagcagaggaaggcgctgtggtcctgccgtcaggtttaatcctgagcgagaccaatccggtcaacccgaagctgcgcaatgagttcgagcagattgaccctgagcgagcgtccaaaggtatctctcttggtggattcactgagattggcctgaagactctacgctcagaggacgctgaggtgcgtggcttagcgactgaccttgtgcgttctccgactggcatggagggaggctctaacggtaagtttggtgctacagcatccgatgttcacgagcgtctccacaacactgaccagcgcatgtacaatcaactctatgacgctatgcgtaaagccatggatgacccagagttctccactggaggccagaagctgtcacgtgaaggaatccgtcaggaaatctatcgacgtgccgctatggctatcgagcgacctgagctacagagtggactgaccaaaggtgaacgtaaggtgatggacctgatgaaggaacactttgataccaagcgtgaactgatggagaaccccggcatgttcggtcgtatggacgccaccagcatcttccccggaagtcgccataagggtacctacgttcctaacgtgtacgaccgggcaaccaagcagatgttcatccagcagtacggcgaggagggtcttcagaacgccattgcgactagctggctgacctcttatcgttcccgtcctgaagtcaaggcgagagtcgatgagtacctgtcggagcttaacggtggagctgaggtgacccctgagatggtccagaaacacgctatggataaggcgtatggtattagccacaccgaccagttcaatgcgtccagtgtcattgacgacaacattacgggccttgttggtatagagaataactcattccttgaatcacgtaacttgttcgacagcgacatgcctatcactctgcctgacggtcagacgttctctgtgaacgacctaagggattacgatatgttccgcatcatgccagcttatgaccgacgcattaacggtgacattgcaatcatggcaggtaccgggaagaccaccaaggacctcaaggatgccatcatggcactcgataagaagtccgaaggtaacggcaagctcaagggtgaagtggaggcactgaaggacaccgttaagattcttacagggcgagctcgacgcaacaacgatacggtattcgatacagcactgcgctcattgaatgacctttcgttcttcgctaagaacgcctacatgggtccacagaacctgacggaaatctctgggatgctcgctaagggcaacgttggggccatgctgaataacatcccgattcttaacgacatggttaagcaaggcggtatgaagggttccgaaatcaaggaactccacggtgttctgttcggtcgtgagtttgaccagcttgttcgtcccggtcgtgcggatatcatccagcgtcttcgtgaggcttccgatacgtctgccggagtggctaacgttgtgggtaccattaagtttggtacgcaggaactggcagcccgctctccgtggaccaaggtcctcaatggtaccgctaactacattctggacactgcccgtcagggtgtgcttggtgatgtagctaacgcagcgctcttagggaaatccgctaagttcggtaaggacaacttcctgaagtctgcgagtatctctaaggaacagtgggctggcatccagcaactcttcaaggaacatgctaaggtcaacgaggatggttctttcagcatcatcgacaagaagaaattctctcaggacccacgcgctatggacctctggcggttagccgataaggttgccgatgagaccatgctgcgtccacacaaggtttccaatcaggactccaaggcgtatggtgcaggcgtgaagatggcgatgcagtttaagaactttgtcgtcaagtcactcaacggtaagttcgtccggtctttctatgaggccacgaagaacaaccgagcgattgaccaagctctcacccacgccatctctctgggtctcgctgggacttactttgcgatgcaggcccacgtgaaagctctgggtctacaggaagaccaacgtaaggactacctgaagagagcgctgaacccgaccatgctggcctacgcagcagtatctcgaagctcccacttaggggctcctctaggtatcgctacgatggtaggtggtaccctcgggtaccaggatgctcagatgctccgttccaccattctgcctaaaggtgtcgaagagaaacgtaaaggaaccaacgaggtcaaatctcgggatgtcctagcgaatcttggtggcaaccttgcagcacaggtgccagctctgggatacgttgcgtcagttgcgtctaccgcgatgaacgctacaggtgtgctgacagctccgaacaagcctaccgaaagggacttcatgactggcctgatgaatgccaccagagagattgtacctaacgacccactcacccagcagctcatcatgaaaatctatgaggagcagggtgtacgcatcaaggagcccgctaagcagggctaacgactcactatagggagagacctaataagtcctcccttaaagtctaactataaggagaaacaatatggcatcacctacggtcgttcggactgttaagcgttatcctcttaacggtagcattcgagacttcgatatctcgtttgactatctggcccgtaagttcgttgtggtctccctagtggatacctcaggtacactggagcgccgccaactggtcaacgtgacagactaccgcttcaccacaaagaactccatccagaccactgtggcgcatggcgctgagggttacgatgagattgagattcgccgtgttacctctactacagagcgtgtggtggacttcgctgatggttcggtacttcgtgctcaggacctcaatgctgctcaggtacaggcgatgcacattgcagaggaaggtcgtgaccaagccctgctgtctatctctgtgaccgactcggggcaacttgacgcccacggtatgcaaatcattaacgtggctccggggacttctccgagtgacgccatcaacaaggaccaattggatactaccttaggtgaaatcggtggggtacttgatgaggttgaagaaaccaagcagtggattaaggactatatcgataacttcgtgaacgatacagcgaaccttaagaacgtcctttgggtctacaacggtggtattgctgtcggtggtgagaccgagattacggtaaccaaggaaggaagcattgtgaccatccctgcgatgtacatcaacggtgaccgtcaagagcgtggctggcagttcgactattcgtccgtcgataagaagattatcctcagcaaaccgctcaagtctggtgacttcgtggcgtgtctgaccgctgaaggttccactccaatcatggacctgctggcgtcaactgaaggtgcttccaacattgggaccactaacggtaagactgtgcaggagcgcatcgacgagctgactcaacgtattgactctgtgaccaacttgcagaccattaacgtgctgtctcatggtgctgttggtgatggcgttcacgatgactacccggcgttccagaaggctctactcaaagctcacgagctgggcggtgctgtggttgagattcctactccgaaggtggagtggcgtatcggcttcccgctgtacctcttcagtaacacctcggtgaaaggctctggtgttaactgtcgcatcaacttcgtggacccgctgtattcccgcaagtcccgctctgggttcgtcattgggtctggatatgagcagaaccgtgacaaggccattcagtgtctgcgtgacggcacttgggcgactaccgggtccgtagtggatacctcatttgtagagccagcacgtggcgagtacatccgggaccatctggaccgcgtacagtcagccaactgctcaatctctgatgtctaccttgtggcaacctatccgaacggtacgacccttaagggcggctatgcggtgtctggtgccaacgcgattgacagtgtggtctacaacgtgtgggctgaaggtttcactgagattatcaacttcggttctgacgtacctccggcgactcctagctgtcacaacctccacgcttgggacatcgtgagcgttaaacctaacgactacgagacgtactactctgctggattcattgcgaactccaccatgtgcaccattcgtggctttaagcagctcaagccgattgctgatggttctcctcatggttccggggcatccctgaactacaccgaggactgtggattctatgacttccacatcccgagtctgggacgtacggcttcctctgagggtatcctcgtgaacaactctaagggcgctgtggtccataacgtgaccattggtaacgctaagactggcgtagcggaatactacacgactggtgctggtatcttctacgataggacccgtcctaacgtgttctctaatatccacgctaacaactgtgataacgctgtggccctgcgctctaagttctccgtatggaaggacattacgcagaccaactgtacctatcacgtgtactttgggaccaccaacgctcaggcgtgtgacgttaagttcgtaccggactccttaggtttcggtaacaacgttgacggtcttgcgcgtatccgtgacaacaaagtggctggttatcgggaacgtagcgtgtaccttcgctctattggttaccttgtggaagacaaagcgtctctgcgtagctgggaccttaatcgcaccatgaagctagaggatggcgtagggtgtcacattctgtatccggtacctccgtacatgcgagccatcttgagcgttaaccagaagttcacctttgaggtaaactcgcaggccaagggctccaaggtgacggtgcaggttcgacgtctggcaaccttcagtggtaactctaacgagtccccggtgattgagtttgagaactctcgtacagcgtctgtgaacagcgttcaggatactgacgtccagaccaacgcgcctcgactggtggtcaactccccggatgacggcatcccgaactctatggatgtccttgtgaccgtagagaatccagcagttaacatgaacatcaaagaggcacgtatcgtgtatctcggcgactaacaataaggagactaaatgttactcaatgaactgaaccaacctcgtggggccactattggcctccttaacgatggtcgtactgtgcaggaagcaatcgacgagattgagactatcaagacccgtaacgtggaccctgagcgattccgtgagactatgacgtcaagtgacgacgatgtattcgctaagatgttcgcttggttagccactcagactgacgtagtggggacctcagagtcctcctacatctcagctctgccacgcatgattgacctgtctgggcgtacctatacgctcaccaaagttcaccaactggacggcaacttcgggattcagaatggtaccatcttcatgaaggaccaaggggaaatccttatgggtctggacgctggtaccaagactcgtcgtcacttccttaagtatgtacattttgagtacattggggacgctgaccgtacacagtctctggtgaccatggctcgatgcttcaactctgtggtgctgttctgtaacttcattgcaggtggtgatactgcccgtaatcgcactccgcgtactcgctatggcctgttcgctggctctacccgttgctggggcttccagttaatcggtggtgagtattacggtggcgactgtgcgttacgtgtaggccgcgctaatgaccacactgggttgaccattcgtcccggtacggttcaccactctcgcgtcatcaacatgatgctatgtaaccccgctggtgccgaagtgtctggctgtaacattgaacacgcagacaacggtgcgattggcttagggattacctcaggtaccaacacctccggtaacgcagcccacggtgttcgtatcaacggtgtgtacttctacaacaacggtaacggctctagcggctccaacgttgctccagccaacatcctcatcgggaaggacattccgggaactgagggttgggaccgtgaaggtcttccgattacctccagtaagaacactgcgcacagtattacggtatctgagtgctacatcgttagcccgaacacccagaacgcttggcaggtgaacgccctctacggtgtaaactttgtggataacaaggtgggccttaaaggcgacgctacgattcacggtgtctacgatgggacctgtgccaactgctggacttacggtaaccgtgaccaaggcggtaagaccttccagttctcctctacggcgaccaaccagattctgactacccgtaagggcaagtggactccgaagctcatcggtgagacctccgcaggtaacaccaccctgagtgctggtggcggtgcgtactctctggataacgggatggtgaccgtaacgtgtttcgccgttgtgggtgaacgtgatgacgccatgcagggtaacatcaacattaagttgccgtttgcgtgtgaggaccagcagcgtggtggtaacggaatctccctgacgaacgtcccggatgtttccaacccggtgggcagtgttatcgttattggtgacacggctcgaatcatgctgggctctgcccgactgcaacacaccaacgttactggtggtaccgcgattcacttcagcgtttcctacccggtagacgtgaaagtataaggaggaccgatgctgtctttagacttcaacaacgaggtcgtgaaggcagctcctattgtggggacaggtgtagccgatggtgctgcccgtctcttctgggggcttagccttaatgagtggttctatgtagccgctattgcctacacagtggctcagattggtgccaaggtagtgcagaccattatcgactggaagaaatcgaataaggagggttaagatggacttgaagaagttccttgagatgctcgatacgaacatggcgcagcagatgcttgctgaccttgctatgccggagaagtgtacgccacagctctacaacgcaatcggcaaactcttggaccgccataagttccaaatctctaagattcaacctgacgtcaacatccttggtggactggctgactctctggaggagtataataagcgtgtaagtcccgatggtctatcggatgacgacatctacacgattcagtaacatactcaaggtactactacatgtggtgcctttatggatgttattgcgctacgcgaggcgtccctacgtgaaatctacgaaacagcgggaggcattatgctggaattttcaaagagaatcgtcccgtatcttgtggttatcatggtgttcgccttcgggtggcactttgggtcacaatctatggacggcaagtggaaggaggtggtacacaatgagtatgtacagaaagctgaagctacagcggctactagcaaagcggtcgcagcgattagcgccaagtatcaagaagacctcgaagggcttgaaggcagcactgataggattattgatgatttgcgtaagcgtaaccagcgcctgcaagtcctcatcaagcctaccaccggaaccccaacaggtgacggtagatgcatcgttgatggtccagtcgaactacacgaagcaacttctcgacgtcttgtcgaaataacgcagaaggccgacctaaaggagcgagcgctgcaagatacaatcagaaaactacaaggagggactaaatgagcgactcgcagaatgcgcgtaacgctctcattgtggcacaactgaagggcgactttgttgcctttctttttgtcctctggaaagcgttgaacctaccgccacctaccaagtgtcagattgacatggctaaatgcctcgctgacccgagtaacaagaagtttatccttcaggctttccgtggtatcgggaagtcattcatcacgtgtgcgttcgttgtgtggaccctgtggaaagaccctcagttaaagattctgattgtctctgcatccaaggaacgtgctgacgctaactccatcttcatcaagaacatcatcgacctgctaccgttcctcgccgagcttaagcctcgacaggggcagcgtgactctgtgattagctttgatgttggccctgcccgacctgaccactctccttcggttaaatccgtaggtatcactggtcagttaactggtagtcgtgccgatatcatcattgcggatgacgttgaggtacccggtaactccgccactcagtcggcccgtgagaagctctggacgctggtccaagagttcgccgcactgttgaaacctctggacacctctcgtgttatctatctgggaacccctcagaccgagatgaccctgtaccgagagcttgaggaaaaccgtggctacacgaccatcatttggcctgctcagtacccaaggactcgtgaagaggatatgtattacggtgagcgcatggccccgatgctgcgtgaagagtacaacgagggctttgagattcttgctggtcaacctaccgacccggtacgattcgacagcgaggacctccgagagcgtgagcttgagtacggtaaagctggctacacgttacagttcatgcttaacccgaacctcagtgatgccgagaagtaccctctacgcctccgtgacgctatcgtgtgcggtgttgacagtgagaaggccccgatgcattaccagtggcttccgaaccgtcagaacctcaatgaggagcttcctaacgttggccttaagggtgatgattaccatagctatcataccgcctcaagtaactacgggttgtaccaagagaagattcttgtggtggacccgagtgggcgaggtaaggatgaaactggttggtgtgtcctgtacacgcttaacggctacatctacctgatggacgctggtggtacccgaggttacgaagagaagtcccttgagttcctcgctaagaaagccaagcagtggggcgtacagaccgttgtgttcgaatctaacttcggtgacggtatgttcggtaaggtattcgccccggtcctcctgaagcaccacaaggcggctctcgaagagattcgtgcgcgtggtcagaaggagctccgcatctgcgatacccttgagcctgtcatggcgagccatcgtctggtcatccgtgatgaggtcattaggagtgactatcagaccgctcgtgacgttgacggtaagcatgccctgaagtacagcctgatgtaccagctcacccgtatgactcgtgagagaggcgctgtggcccacgatgaccgtctggatgccttagcgttgggcgttgagttcctgcgtaaccacatggagcttaacagccaagtagccgaacaagagggtcttctggagttccttgaggagcacatggagaaacctttggttggcggagagtctctcatggagatgacctacggtggcgtgacgattggctgggaagatgacgacatgagcatcggaacgttcattgaatggtaatgcattaagagtgcataaggaagcattatgaccacggaaggtcacgtttagagaaacctaatgaaatcaggcatttaagcaaacgactcactataggacagagaggggacttaaagcattattatagatactttaagtattcattcagtcaccctaaagtgcataagatgaccctagagtatggtgattcttatcatcagataatcacctaactaatagacaacctaaggaggacactcgtgttcaagctactagttacgctactgagacaccgagtgacctataggtttcttctggtacttgctggtgcctgtggtgcttcattggtcactcaacagcaactcagtggattggagactctcctgtgcactgtactcacttgtagcgattagaatcctgctagacccgtaaagactcaacgcagagtgattccgtggatatgattatcatcatacaccactccatcactgtagagtcaatacctaaagtataaccttaagactcacctgtaggctacaggagggtctctacgggtctctccagaggtctacctttagtaggccgtgtaccattagtgataccattagaacctaatagatggccttatagaggcctttaagaatataccacaaaagtctgagagcatatctcatagtttaactttgagtaactcccccggtaccccttaagtatcccattagagagggtacccctgtggataactttaggatacctgtggataactattggtgttcctgtggataactcaaggacaacctaaggtgttagggtggcttgtggataactttgggttacctgtgggtaactttgggtg

SEQ ID NO: 18 - DNA, 51691 bp, Unknown
  source: /note="Description of Unknown: KP3W-S0101 Bacteriophage sequence"
aaaatgccgtcaccgtttacgcggcgtcgcttaccttctagtttgatgtggctttcgcgttcgcggtcgtccatcatgccgaaccaaaagtaatgcgatactttagcatcttttagtcgctgcatcatcaacatactgttaaaacttccgataatgccgctcgcccggttgcgcgaccacctgccataaatggcgtatcggccctcgatgatttcatcgatctgttcgcgagtcttgccgatgttgttggcggttctaactttcgttgtccagtcagcgacgatatcggctgttaacttctggattgatgcctttgcggtatcctgccatttattcagcgcctgctgataccactgctcataaccaccagcgccgaactccttcagcatcatgaccgcttcattatcgcgcccgccagccgccagcgcaataaccagccactgcttagagttgaagcggtagatggtcaggccaatggatgccagcgccgcaatgacggcagaaaagaacgcgatcgccgcctcgttgatatcgtcttccgcctcgttgatttcctccgccgtggcgtcgaacttcaggcggcctaaccgatcccgcatttccacgaccagatcggttgtcgcgtcctgcatcaagcgggataaatcccgctcgcttgcttcaggataacgccagtttggaattctgccgttaactttcatcgccgccctcctcggtgttgttcaggatctgcgtgctttgcgttttggtcttgcctgaccctgacgtgcgatccggtagctgcttctgttccggcgcattgccctttagtttcagttcgggaaccatcgcggatagggtatcgcgcgcttcgttcgcgtcaatgacctgatccgtaaccagtccttgtaccgcttcggcgtttttcttaaagatatcagccttctctgaatcggtcggcagtgacagcggttcgaactctacgctgaagtcttcctcagtgacgatgaattgtagcaggaattctaacagtggtttgtagtcgtcgttgcgcttgcgctccaccagcttataaaacgtctgcaacgcagtgttttggctggcactaacgccacctgtgtttttgttcttcagtacgatctcatgaatgcctgacagcgcgacaatccgatccattttggcagacaagaattccgggatgcctgaaatatcagagttaataacggtgtattcttcgtcgtccgcatcaatgccgatcgtgttaccaacaccggaattcgcgtcaacctgggccatgcgcaaccgggccgcgtattcgccctccctgtcgtcgcagattagagcaagacctttggccttccacacgccctgctgcttacgcttcagcaactgcgttgcgaggtactccgaataatcgtaatcaagaatcgcttcaatcatcgacttgttcagcaccgtgccgccagagcccttgttgagtttccgcaccttgttggttacgcgctcgccgtcgatgtagtgcatgcgggtataatgcacgttaaagtcgcttccgccgtttagcggcttgacggtgtacattttaggcttgccgaatcgtgggcttcgcgggttcttctcctcctccgccacggacacagaatcgtagtcgtaaacgacaattgattccagcggcttaccgcgcttcgcggctgaagtcagcatgcggccatcgttaaccatcgccaggacgtaagagccaccatacaggcgcgcccagcagagggcatcggtgatttgcggctcaagtttaaggccgtcccactctgactggaatttcgtgttatcggagacgccgttaagctggaagccgggcgacaccatttcttccgggatcacgtcaacaatctttttcgccagtccgttattgtgatagaactcctcgacttgcgacatatccccgaacgtgcttgcaatcatcgccgtggttgacgcgtaccccgcgccaccattgaagatctgattgtagtcatccatcttgatagctttcatattttaaccttgtgtgatttgtgggccgttaagcccacattatgtattagcggcccagctttttcaatcctgccaggcgtttcattcgttctaccgggtcatcgctcaggttcatttccaggttagcggcgtcaaatacgttgtcgcaaatgtcatcgtggggatgtgaatcgtcataggtaaatgcgctcatttccgccacaagctccgcaatgaacggatggttgtccggcagtacgacgcggccacccttgataattggctgcgcatccatagcgcgagtaaccttatctttgtcgcgctgaaccgggacgatctcacccatgccattaactgctttggtcagatcctggattagacccgtaccgctcgccttgtcttcgatgtaaatctttcgcagattcccgcattccttgtttctgcgccagcactgcttaatgaatgcctcagcctgcacgcgcaaatccggcgcttcccacttgccacggattccatcaatgaagtagacgcgatcgcggtacttgccccaatagcacagcactgaatagtcgtttagttcgttcgtcttctgcgccgtatccgccgtaatgaaggtgtattcgaacttgtccgggcgcggttcgtgcgccttttcgctgtcgccgtaatagcgccaccattccgacttaaacacattgccgcccaatgcgatcggctcctgctgatactgcgaaaggaatgtataaagatcggcatcgcgcaaggcaaccaggttctcgatcgattcgttgtcctcccaaaatgaccagtattcgacgccatcaatgaccaccgacggcccggataacacgtcgcgttcgaactcaggacgcaaccagtcagggagcgattcgccgtattccctcgttaccatcgccggaataacaatgcgatcgaattcgatagccatcccgccgctcatcatgaaccaggtggaatcctgtgcatgcagccgctgctgtacggacaggatcggcgtttcgtcgccttgtttcttcttcgcacgacgggatcgaatggtgttcttcagcaagatgtggctcttttcgcgcttcacctttgagaacatatcatcaggcttgtcgatatcatccagcgcgattaggccgctgaaacccggcgtcatgtacccgccacgcttaccgacgatctgaccaccagaagaacgggacaccatttccagccttacgcgatcgttgtcatccaaaacctggaattcgtcgatctgcttccgcccgaacttcgagggccatagctcctgccattcgcccgatgaaaagatcttgattacgcggtcggagttgccttttgaaagcgcatcaccctgtgagatctgaaggtttcgaaccttccggcatttcagatacgcatacggcgcgaggtggatagaaaacgcttcggttttcgtcgaaccaggcgcaacgtttacgatcgtgcttttgcgcttcccggcgatgatttcatctaccgtgtggcaaaagtaggagtgatgccagttccacatcagcttttcgccctggataatctgaaaccagatcttcaggaatagcgaaaagttgcgcgtgctcaacgccttgattgccagcttgtcggctggcttcaggtcttcccaaataatcatttcgtcattcatgatcggcccttaaatcttgtccagaatgttactaacagccttctccaatacttcatcggtgatctcgttcttgttgccagctacggcgtcaatgttgagaacggctggcttgtcgatccccatttccttaccgacgaacgaagcgttaatcatgccgacggcagcaagctggaatttctgctcatagattacagagtcgataaactccatgaccggggcatagttagggtcgtggcgatagcgtacaagcgttgactggtttacgccgcaaaacaggcttaaccctgtgatcgtgaaaatgcgcggcttgttcactccccactcgttaacgtcaccctggaaagtggcggtttccgcagccttgatggcgttttcttcggcccactggaaataacccttcgcgatctcgaagaattgttgtggcgtcatttcggcggttcgacccagcactacaccaaaatctttttcgtatagcgccttgaaattgccttcgaagtgcgatttcgttacgcgtttttttcgttcttcagacattgttaatcctccttctgtgttgagttgcgagtataccagattgcaggcacaaaaaaacccgccgaagcgggttatgttcatatcaatttgttacgccgcttcagtgttttctgaagtgatgcaaatggctcgcagtcaacatacgggagcggcgaaaactcaattcgtttcgcgataccgcccggatcgccaattttttcccagcgtttcgttttcttgttgtacagcatcgcggcgaaagtgccttcatgcacgcgtttggacagccgttcgacaaggtggaaggttccggcgtagaagcctatgaccagcataattaacgcgataatcagagttatcattgtttcacttcccttacgtagttgatgcttattttgtgagtatccaggtttacgccggattgtttttttgctttctccaccgcgtcggcggtatcgttcgcttcaatcgtcatgctgaactcttgaatgcaggacttgcaaaagccgcccattttccttgctgtgagtatgaccttgtactgcatcatcacccccccaataaatgccccgaagtggggcgagacttgcggatgcttaccgcctcttgtgtctacgcttttaacgatacccggtcagcgcgaacgcgtcaataggcggttagttcgttcgattactttttactcatactcgccatcacggcgaccgaaacggccttcgagatagccagccagccagataaactgaccgcgagttaacagcgtgttgacttcggcccaatgcttatcgatcatccgggcggcaacctgatcgtaagtctttttgtctttccgtatggcgtctttggtttccgccgtcattcgtttcgccacgcgcttcacagcgttgtactgcgcctcattcagtccgaacatttaagccttctcccattcgacccaggttccgcgagcaatgaagatctcgacacgcagaggggcgttgaaatttttgtagatgaagatgaaaccttttttgctatcggtttcgacctgtgtaaccgggaaggccagcggagtaatcgtatcgaccgactcactcatctggataccagttaccgttgcgccaatcggcatatcttcgacttttgagaactcagacatagaatcaccttaatgaaatttgcgcccgccagaaccgcttacaggcgctttaaatggtatacgaattcgttaatttttcaagtggtggcacggctcgccatctttaacggctccccactggcggcgtttgttccgctccagcttttccgccaccgccactgccaactgctcatcggtgattccggcgcggcgggttgcgtcccacaccagcatgatgatatcggcgaactcgctaatgtcatccggcgcttcggcggcttcattggcctctttagccaggtgtttcagcgggccgaccgggccaacgttgccgaactggcgatccgaccattccgcgtgcgcctgccggacaaggcggaagggatcccggactgactcagcatcaccgccgcaaaggtacagatctttccacgccgcctggtcgttttgcacctggcgcatttcatgcagtacggcgtaaacatccatcttctcaggccaattgacctggaaggattcaggctggcggatgtattcggccacttcgccgcccagcacgcgctgctgcatttccgcctgcgctttcgtgtcgcaggtgaggcggcgcgatttgcgcccctcgttagtcccgatagtgtaggtcagcacccaaattttgttgttcattcttcgatcaccttatattcgccttcgttaagtttgaaccagtcggtagggagcacctggccgaattcttcggtgtggtagtcgcgccctacctgcgcccacttctcgccgtcgctatagcattcgacggtcagtcgatcacctgctttaaatccggcccactgtgcaagggtaggctcatcctgggagttggtcacattcgggttgacaatctcaacaacggccaggcccaggaatgatttgtctttggtcggatacggaatgctcatttgtttagctcctgattggttcgcttcaataaggccactatatcaaatggccttgcggaagttttagcaaaaagtgctatttgccgtcgcgccacaaactaaccagggcgtcggccatctggcggagaactttcgcatgggtctgcgcgtcatcaccttccggcgtgcgcatggcttcacggattttctcgatcgtgttgttggcggcgttaagctctgactcaagctctttaacccggtcagcgagcgaggcttctttcgcgccgtcctgtttcacgatcaccgaccgtgacagcatgcccagggccgaaactgcatcgcttgccgacttcacgccctctttgaagtgcgcggatttttcagcgccgatcttaaatccacgtgcaacgccccgcgactcatcccgcccgaacatgttcagcacgcgctcggccagggcttccagatcctgatctttatcgcgttcgtgggccttcaggtcggcaaagaacaggggcgactcggtggaggtgatgccgccgaacattgacgccgaagtgtggatgggatattgcatcgcgccgcccactaacccgccgaaggagagttcgccaccagcgaaacagttgttgatttgcagctcgatgctgaactgaccgccgccgatgtagtgcgagttgcgcgggttgaccgcgtacatgttgccttcgtcatcggtgattttgtacagtgaatccccggtgtatttggtgaaaggctcggcatcatagcgcttgcctttggtgaatttcgcgcccacgccagcgggagaatcagcgttcggggtcaggatgaatttgtaggtgctcatgatttttcctctttggttggtgtggggatagtatgcaccatccccggacggcggttttagcaattcgtgctatagggcgtcgatttccgcctgcatgaactcgcggatggcatcgccacggctgcaatcctccaggtactcgctgatatcgtgctgaagctcgcctttttcgtcggtgtagaatgcggcccaatcccgcgcccactccttgacggttttgtagttgccgacgcgcttaactcctgcgtcagtccatccatactggcgggcgatgatgcacattgcgcgaaccaccagtttgcgatcggtcttgcgcttcgccttttcgaaccgtgcgaactcaccgaagatgccgcgaaccaccagatcatcatccaggtagtatccgtcgaagtgccaacatgaggattcgttatccctgctggcggtgatggtatcgccaggcttacaggaaatgctaactagcgactcgactgacacgcatttcagtttgattgtgttcattagcggatctcctcgatcgcgctcaggcagagtaagtgggtcgcgtagtcaagatcagtttcggttgagcgctcggaatgctcgccgccggatacgcagaatcgcacgctgggaacctcgatctgaagttcggtgccgtcctcaagctcgatgatggctacggtatcctcagccagcatgcttaacaggtcgatgatgtggtcattcatggtgtaactcctgattggtttgtttcgcttcagtaacgccactttaccaaatgacgttacggcaggtttaacaaaaagtgctattctttgtcgccagtgaatgcggcccggcgaccacggcggaagccgttaatctcagagaggcggcttaccccgatgataaccatcatcattccgatcatttgccagccatcttctttggcgaccaccaggccacccaggaaaagaacccaatacagcgcaatcattttcttgctcatagtttcacctcaaataaaacgttgttttcatatggtcggttaagaaacatcgcgatcttctcatcaggcatgcggcacgccagccagttttcgcccaactccgttgttttcttgtcgtcctgcaaaatccagacttcatccaggccggggccgaaactggcttgatactccttgcccacggtgaacagcggggccagtggcccgtagccagcatgagtgcaaattactgttacggtttccatcgcgtcagatctcacagttggttggcgaagatgtgccacacgtggcttttcggcgtgcgcttcatgagtttgtgcgccttacgggccatgcgcttatagtcgcgcgaggtcagcttaaccggatcggcaacgaacgattcgaccaccagaccttcacagaggtattccggcgaccactccatgaactctttgccaggctggaagcggacaaggcgcgagaggaatttagaatcgtacaggatctcgccgcgctcgccgtagtagaacgcaccgcgcattttgccgtcattgccaacatgcagcaggtgaatgcgggatttctttccatcgaagttggtgccgacgatggcgacgactgcgtttttgataaagtgtttcatggtaaatctccgttgttggtgtgggataattatgcccgatccgttgaccgggcgtttaccaaaaagtgctatttcatggtgcgaaggtcgattttcgcttctgtccagtcagggacgcagggcatttctccgatttcctgcatgttcgcttcgaccttaccccaatcgctccaggccttatgctcctcgcagacgatgcgcacatcttcggccatcgactcataagcccaaatcgcgccatcttcatcaatggcaaccgtgttggcccaggctggtacgtagatgggttcttcagcgccggggatatgcaactgaaacgcgatcgcctggcgctgcgtgatggtggcaataaccttgccgccggatttgatttcgttggtcattattcgattaccttaaaggttgccacgaccgaaccgttacggcgttcggcgttgatggttgatttattgaaaaagaaccaggtgttgttaccatgaaccacatcacagccgatcgagccatgaggggtgcggacggtaacgcccagctccgcgctgtactcaaatccaggggtgtagttgatagtgtttgaatcggtgcaacgtaatttcatggtgatagcctcgtttgttggtatggggtaactataccagcctaccccgatcgagttttagcaattcgtgctattcaatcaccttgattacccgttccgggcggtgcggtgcgccggatttgtggagccagtagcgggcctgcgtcaactggccgaagtgctcgaccgtcacccaccagaagaaggcaacacgccgctgtgctgcataccactccaccggacgcccgaaggcgtcaagcgtcgcaatgcgcacgatcctgaatttgcggttagaagccataagcctgactctccagggaggcgagcgatgagaacgcgtaagttctggtgcatgagtaatcgcccacgaatccgcagatctcaatgcttccggcctcaatggtcacggatataactttcatatccaggtgaaaggcgaacatggcaagcgctttatgtgcgcgatgcatatattcgaactggttcatttttccgctccttgtgcgctctctacggcatcggcgacggacagcaactggttagccagatcgcggattaccttcgggtcgtcaaatacgcagcaaccgctatcgtgggtcgccataagctccacgccagcagcgccaccactgaacggagacacgaccaattcatctccatccgaatcgcggtagcataccgtttgcagtttctggtcgctcatttgaacagcgcccctttgattttattccagaatgagaacggtacgcgctttggcttcaactccaccacgtcgtgatcgtagaagcccaggagcacgccgcatttcttcggcggtacgtccccaatcacatcacccatgaagtaccagctatcgccatccttaaagtacaggccgacgcatgcgccaggtgcggcgtgggtagcagtgtccggcaggttgtaggtcttgccgcgagatttaaattgttgcattgtcattgctccttacatgaaccagcccataaaagcaccagcgggcgcaacaaagatcccgataatgcggatcatcaattcgtcaccatgcgcaccgaatgcggctgcaatgttcataatccagccgatgatagcggcaccgtatacagccattagtaaagcgcttaatgttttcattgcatttctcctttatagaaacataccagccaggcgcaggcgggtaatgatgccatcccgtttagcgcgcaggccatcatagtaatcttccagttgcgcatcccatgacggcaggtcaagcataagattcatctcgttgcacaccaccttcagcgcgtggaagtgttgctctaccgcgcgacggtgaaatgctgcattgagtgggttgttttggttgccgatcatgtttatgctcctctgtttcgatggggtaatgatagcgcatcacccagattgcgttttaacaaaaagtgctattgctgtgggatctggaagcagagttcccgccagttgcgatgctcgcggccagtgttacccaggaagcagactgttcgcgcaatgtggccgtactgctccgaaccgcgaagccattcgcccaggtaatcattcgcgtcgtcgtcatccggcaggcaggggcgcgggcgcatcttgaatgcgaagacgtcgccgttaccgtcgatggcaatgtgggtggccccgccctggatggccgtctgtgcggttgcagtcgtggtgcttttgtcgatgccagccaggaagttagagaattcgttcatggtcatgctcttttgctccggctccggctcaaccagaatcagtgtatcgttgccgaccatagcgaagaatatttcagccgtcatgttagacttcttcgccatcgtgccttcgcgctggcgcatcatcactgcgtcatcttccagccagtagatcaggccattaagggtgttgaggtattcgcgagatttcattgtggtgctccgttgttcgtttcgatggggttactatagcaagccaccccgatcgtgttttaacaaaaagtgctatttgaagttgtgaacctggttcccgccgctgtggtcgtcaatgtcaacgccgtcgcaggtgacgtaaaagccgcgaatgacggtaaagcgccagtggccccgccagtggaagtacacgccgaattcacggcccggcactgccttcgttgactccttcgggatctgaagcccggcaaaggtgcggagttgaagcgttctgttaaagcgtggcatggttgatgctcctctcgttggtgatgtggtgataatacccgttccctctgaccgggttttaccaaaaagtgctattgcggatagtccaggctaacgatattgtcggcgctgtcaagcatcatctgaagcacgttgggcgctccgatgaactccggtcgtgtcactgcctggcccgtttcggtaatgtgctggatgtatgactcagaatctggaagaaatgacatcaaaagcaagtcacctgtaacgcattctaaggcgcttggattttctgcctgtgatgcattgattactgcgtcgataacgtcctgctcgcttactggctcgcttcccaggcgcattggtgccgccgggtcggactggtcttgatagagtttcataccttttcccctttgattctggttttcagtgccattgtgtatccgttgtacagcaagccctttggcatcacttcgtcaacgatcgataaaaccctttcccgttcagagtgaacgccctgctgcctgtaagcatcggcctccaggtcacgtcccgcgctatcatcgaactcagtggacacgatgattaacccggcccccaggctcacgcgcaagacctcgccaggctcaaggagttttagcagtggtcggcggaagtggttatcgacgggatgcgcgccgaatttttccgtgaactgatctgctgtcatctggatacgtcgcccgccatccaggaacatgcgccggatctccttcgagcggttgcctttaaacgtgccttcaatggcccggccagcctggtgattgccctccggctccccgaacgtgatcgattgcagccattcatggtaagcggcctgcttttctgcgtcgtactgcatccattcggacacgtcgacttcttcgaactcataacccttgtattgcatgtttctcccccacatttgcggcgtttgttggtgtttggtaaggcgagattaccccacgcaagccttgctgtcaaagggtttgagcgtgtttggtaagattagtaagcatcccccatatacccctttatacatatcgcgcggcggaacatctaaatttatggctctcgcaagatgattccggtagccatgccgggagaaatcttaccaaacatatatagatagagagagtaataataataatattgttatttatcatatacttatatatctattatagtcttatattggtcactttttgtgcaattttcaggtaagattcttcctcccccacattcccacacgacgtaaatgtttgggaaacacactcgacgttttggcaggattcgaacggcaaattatgtgcatagtgcatgcatctatgcaattcgttgcacatcatgaaacactccatcataacattgcacagaatgaaacaatcacaatcaatcatgaatcgtcaaaagtaatcaccagtaaatcagatgaaatcacaacctattccactattccgaatggatggaataatcgacaatcggaggaatagcacaaataatcaaaaccacgctggcgggatcgggtatagtcatcacatcaaccagtcaggagcgaacacgatgcaaacttgcaaatacatcaccaaagcattctcctacaaatcaaccaggatcgcagttatgcacgtgaacaccaaaaaggatggcgaccagtacaaaatcatgaagcacgtcatcaactatgttcgtgggcagaacgtcgaatcatggcgtgtcatggggagcgccagcacgttcactgatttgcgcgagtgcatcggcaagttcgaaacgctggtcaactcccatcgtaaggcgaccgggaaagaacccattaaattcaccgttgaggattaaaagcatgaaaactggtgttgcgtatgaaagccgtcaatctggcgtgcaatgggtgaagggcgaggacggcgtgatcaggaagcgcataccgggatctgacgaatggacgttcagcgctgcaactgaatttctggttgatatgtgcgtttgcgacggattcgttttcgaggtgaagcagggcgattaacggcgacgatgccaccgtgactggttccattttaagggcgctacgcaattccgcgccgactttgaggaaaatgcaaatgagaatatttacccgtagtaagtgggccgtggttgaggctgcgacggagcacaaagagcgcaagcatgtggagcgcgttaccgatcgtgctactcaacgttggcatgactaccagtccgtcaaagcgatggtcggccagtgcctggagttcggggagtctggagagttcactatgaacatttggcacgaaagcgcggcgcattatccccagcgagggatatggcgatacggtcatacggagtacgaaaccactcgcgcgaccgtcacatttggcgatcacattcaggccgtgatttacggtgatgaagttcggttccgcctggtgtaaatagcactttttgttaaaagccccgcgtgggcttttgctattattacttcatcgaaacgaagcaagcaaaaaggaaaacatcatgagcaacgtacatatcctgaccaaagaaacttccaaaatcatgagcctgatttacaaagcgcagaaatgccgccgtgatagcaagtcttctaacattgcaggtgtacgcgcttacggtgaatacctcggagtcatggcttgcgatatcaacctgatctgtgatgccatcatggaaagcaaaaaagctgacctgttcgagatgctcgaagaactggcaatttggttccgcaaaatggataaaattgctcaaggcatcaaataagcacgaattgctaaacaccgggccgcgaggcctggtatcattaccccatcgaaaccaatcaggagaatcaacatgaaagcatttggcgacgtcgtaatcggtgacaaaattcaatatggcgcaagcgacctgttccgcaccgtcaccgatatcgagaaggggcgaggtgttaacgggcagaccgttttcatcgtgctcgacggcgtggcgcgcttcgcggttgatgctcgcgattgggttttctgcatcgagaaggggagcgcatgagaaagcggagggtcggggaagtggtttgcacctgcgaggcttactccttccctcatcggatgttcggcggttcatgcaacgggatcgccatcgtcatagctaatgttggcggatctgattgccagcattgccagttactgaacaacgggcgctgtgaggttctctccgggatcgaaaacccgatcgagtgccactatgtcgccgacttcatccaccgaaacgaggttaagatctaaatgagaacagttaccatttcgaacagctttacctacatggtcggcgcgccggatgttgatatccagatctcgcgtgatatcgctgcccgagacgtgacggaaaagtttaaggcggcggcaactgctgcaatcatccactattacgggcgtcaccctgaagacttcaaagccgacgacacgccgtttgtcgtcaatacggttcccgaaagcaaggcgtggcaaatcaacgacaagcagacggggtatttcatcttcggtgcaacaccctgccgggtcgacagcaacgatatcgaggttcagagcctggaggatgccgcgccgcgtgttcagcgcacaatctacatctgccaggattacacgacctgcgttcccgaatagcacgaattgctaaaacagaatttggggatggtggcatactgtccccacaccaacaaacgaaggagttacacaatgaaccatccgaagactgattcgatcctggccgtactgaacgcacatggccgcgtcgttctccgcatgaaccgcgaatccggctttactcagatcacgattaccaaatcgaatggtcgctatgttgtcggcacggttccgggcgctcgcctgattccgtcctccctggctggcgtcacgctgacgctggaatcgaacagcatgttcattgaatcgtggagaagctaatgaaagaaggcgatcgcgcatacctggaagtcaacggcgaaatgcatcattgcaccgtgcttctgaaaagcaagggcgtctacatgttcgtcaatgagtttggcgaggaggtcgcgacagtgcaacttttctggtcgacgaagaatcccggcgatagctccctgactggtagaccggatcacatcgtggcgaaggaaagcatgaagtgctgcgaggctccagggtgcggggccgtctataaggtcaaggcggcggatcttaaacgtggctggggtaaaacctgttcgaagtcatgcgccgccagtttgcgagaatttaaccggaggaaaagcaatggctgataattacgacgatgcctactggcaccgtttcttaaccgcccaggacgcagggcttaaccgcgaatattgcatcaaagtagccaatcaggaaatgacgctatcggatgccctgggcagtatggatatggatgccgaaagtctgccgatgcgtgacgatctggcagagcaagaagaaaatagttgcggctgcactggtgaagaaggttgccgcgaatgtatccctttctggtgaggtgacaatgaaaaatcgcgttgtgtggtgcatgtttgacggttccgggattatgggtctgccgtgggcaattcgcggttgcgatgtgtattgcttcaatgccgattccggcgaccacggcgagtacaaaatccgcatggagcatgcaaaaatccagtatgtcaacatctggattgacaaagatttcgacgttaagcgcacgatcctgggcatcccggatcctgacattattttcgctttcccgtcctgcacgctgttagcgcatagcggggtgaagcacgaccggcagactcaggatgttctatcagccgccgatgatgcgaagatgatcgagcaattgggcgaccaatataattgcccctggatggtagaaaacccggttggcaaattatcggcgctttggcgcaagcctgatttttatttccaccctcgcgacttcggcgggtatgttgcgccgcatgaggaagtttggcaccccaaaatgccgcactgcgacaattacacgaaaaaaacgtgcatctggcacggtaacggattcgtggagccgaaacggttattaccgcctgaaggtgtggagggcgtcgacttcttttgggcgtggaaattcttgggcggcaagtctgaaagaacaaagatgcttcgctctatcactccgcgcggattcgctcgcgccgtgttccaggcgaattttaatgaatagcacgaattgccaaacgtacccgcttaattgcgggtatagttattccatcgaaacgaaacgaggcaaaaaaatgaaattaattatcgcgctgttagctactgcactttcaatgaatggcatgggcggctttctctttgcaatcatgattttgtgggtttgtgggattgttgacgtaatgcaccacaaaacgatgattaatatcagagtgaatcgcctaattagcgatatcgaaggcgcttgcaaaaacactaaatttacggtggtgaaatatgatatctaaaaaactggctgacgtatgccgagaagttctgaagatgaataacggcggcgcaacgatggcggcgatgcaaaacaagatcgaatcgcacgttggctttaaattgagttgcagaaacaaatccgactttctggatctggtaaacctctatatcgaaatgggagataggaaataaaatggcaaagtcaatcaaaattaaatgcacgtcaagccgtgctgttaatatccaggaaaacaacctttattccgctcgcattgacgacgaaggcaacgtgtcaatgatggtatataacagcgccgaactgaagaagaagcgtgtttacttatctgtcggcattagcggtgagttgttcattgctggcgttggtggcgtggtggtggcgacgtttatcgaactgaaaacgaaaaccctgaaatgcgttggcctcgaccacaaaaacccggtgaaaaaatccttcaccgtcggcaagcgttaccaggtggaaagcggtcgcgcgctgggaggcgtcgccgggtacatcttcgaccgtgacggttgccgctggacgctctaccgtgaggaagtcggtttcagcgtgtcggacggcaccacgtttgaggcgaaatacctgtaacggattcggggccatgcgccccgataacctaagcacattttgcaagtgcgtttagattatcactggatctcggatttaagacggcttatcattagccgcacgattaaccaatcaggagcaaggcatgtttttaaatgaccgcgtgtccccacaagatattattgccatcgcagagagggaaggcattagccccttgcgcgtcgccatccgtgcgaacggatatcgcgactccgtttctttctggcccaagccgaaagatatcgacgtaaacgcggacaagtatcccacgatctcgatcgcgaatgattacgatatcgtcggcaagctggcgctcaatgccgctcgctccgtgcaattcccggaatcatcggcttatatgcatttcctcggaaccgtgtccgccgcgatgatgggtcgcttttgggtggagtaccacggcagcgagcaaccgacgacgctttacgtcattacgtcgcagccgccttccgctggtaagtctgcgattaactcgctggctatcgatccgatcgtcgcagaggttgagcgaatcaacgaggcgcgcaagaaagagcgcaagaaaatcatggcgaagttgtccgccaacaagcaggccatgaaaggcgagttgtcgcagtccgatatggcgaaactgttcgaagacaaagacgaacttgaggagaagttagaaagcatgtgcgatctgacgttccccgtttccgataccacgccggaaggcctggcgaaaatcaacaatcggcaaggcaactttgcggttatctcggacgaagcgacagcggttaacagcctgttagggatcacgtatggcaacgacggcggcaagaagacgaacagcgaactggtgttgaaggcgtgggataagggccacgtatcgatcgcacgttccgacgtcagtaacaatatgtcattcgtcgcgctgggctgtatttgcgtaatcgcccaggatgaaaccatcgacgccattatgcaagctggttctcgcggtatcggtgtatcagagcgtttccttttggttcgcgagcaaacgcggttaggtgagcgtgtgttcattgacgaaaacgggaattcgacctatgagccgatcgacaagtctttacgcgctgattacttccgcctcattcatgacattatgacggaatcgtatatcaagctggaagtgactgaagcaggtatgcgtcgactgaacaaggcccgccaggagttggagccggaattaggcgacggcgggaagtattcgcatacgatgctgcgcggtgcgatgggtaaattcgataagcaggtgatgcgcctggcgtcggtaatccacacgatccgaaactggcaacctggcggcaaacgctcgaagaagatcggaaccgaaacgatcgacgaagccatcatcatgtttcatgagttgagcaaaacgtatttgtcgtcggctgattcgtccggctttgctggtgagggagcggagattaaagccgtttacgatgttatcgccagccgttgcaagcagtcgaaaggcgtgatgacggttcagagcatctataacgcgtgccgcaatctgaagatcttcaaaggtcagtccggggtgagcaaaaggattaaggaaaaattactgccgaagatggaggaattaggtttcgtctgcgtgattgattctgaagtgttcgttaatccttcgttcatgaggtaatgaatgtttatacttgacatttaccgattctgcgagtatcgccgggaattcacccggcaagattttgctaagttcgtttacatgcaccgcgaatcgccacgcatggcaaaagccgccaatgtgtcacaccgtatgttcgcctcaatggtttctaaggagtttttagcgagaagctatacgaatggatacctggacggaaaaaacggcgtggtgtggtgtactggcccggataacagggagattggatttaacttccggtcgtttgaagggatggacaacaaatacatgtgggagatgatgcatattgagcaactcgacgatgaagccctattcgggaaagcaggtggaagatctgataacggaggttcacaggcttgtttgcgtgaatcagatcacaccagaaaattacttgcgtgccgcgctcaccttgctatatcaaggaatggccgcgacaaacacggttgaacatgggttgaatgatgaagatggcgtggcgctgctgcacgtcaaacggtacatatgaaaaaaggggcttacgcccctttattttttcgctctcgccacataccgaaaacaccgacagcgaacatgatggccccaacggcaccaatcagccacggaatcatgcttccgctatcgtcgtttcggatctcgatcttctccgccgtaatctggttcgcgtgaatgctggaggtcgtcaccgcctttttgttggaagtgtcaaccttgccaactgccgattctttgaaggtcgtttcctgcttgctggacgtgtccgttttgttcgtcacgccaaccgcctgtttcacgttctccgcgccgacttgcgccgtcatatccggcttgctgcccaccagatcggaaaggatcgggacgctggaagcgcaaccggaaaccagtgcaaccgcccacacgatgaagccgattgccaatgctcgctgaaaatttaagctactcattttagatccttaatgcacagattgaattcctgatcccggcgattatgcaggccgcgcgatttttccatctttcccgttttcgggttgcgatagtacgtccagcggtaaagctgttcgcacgcctcatatagccgcccctggttcgtcaacttcagcatagtgctgccggagtatgcgccgccgccagcgttgaaagtgaagctgtacatcgacgccctgaaggtgtccggcacggccactttgattttgctgtcaactacacgctttgcgacctggatgtgctttgccaaaagagcatcgcactctgaccgggtataggttttccccttgattacgtccggccccgtgatgccttcgcataccgtcgaaacgccagcgatatcggtataaactttgtatttcgtgtcctccacttttgggaggaaggcgacagcgatcgccatcgccgccgcgaatgtaacccgcgttttaatccccatgttatttactcctgatcttcaccgccgttttgatatccccggcttccagcgcttcacgaagcgcctttgaatctcgccagcgcaaccacgcgccgaaggagccgaatagaatcatgaaaaataaaccaatggccgcaatgataagttgcccggtcgcagagcctgcgagggtaacaccgccgctaccattggttgccgcgttgatgaattcccgcatgatatgcaacctctgttagttaagtgataatgcgatgatatatgcgttgggccaaataaagaacaaaaaaaagggaacctgttaaggctcccaaagtttaaggcggtgataataaaggcattacgtagagaatattaatacccttcaaaaaccatatcaaggattttttgcgcgtcgtcttccggctcgccagtagtcatatcaaaatcgaattcgtgataagtttcgcaaatcagatccgggcggctaatatgcttgcggctatcaccctcgaaagtcatgccgtcacgatgcaggcgaacgacaaagacgtttacgctatcgtgcgccgcgatgtgctctacttcttcgtcaaatccgccgtcgctgacgacgcaactaacaggcgaattaacgacggaatcgcaaagcaacttgccgaactgctttttgcctaacgtcggctttacgaaattttcgctaatgtgaatcaggaattcacgcggcgagcggtcgcctaaaaagtcgcacttgacttctttccggctgcggtcgtggtaacggacggcgaagcgggcaaagtcggttgcacccaggatggcgcgcgcaatgtcaaacatcggtgatttgaaactcaggatccgatactcccatttgcgggcgatgatttccgcgatggtgtcttttccgatgcccggcgcgccgttgaggatgattacatttttcatttgtctactccatgagatttcagatggtcgtgaaggttttcgccgtagtcgcatacctggtaagttgtgatacccaggctacggaagtgcgcaataacagtggggctatcatcccacgctgcaacgattcgctcaatgccaatcttgcgtaaaatttcctctttgataaccgtatctttccggttgtcggaggcggagcgcataatcagcaggtcgtaatgcgatgcgccattttgcaccagccatttttcagtgatctcgcgtgcctcatcacttcgcccggtcaggatgataacgataaatcctgctgcgcgcatggcctccattacccggatcgtgtccgtaatgggagcgtcgccgccagccgccatgttgaacgccgtccagctttcggttaggtggagatcttttttcggcagcaggtgcaagcggtggttgccattggacaacgtgccatcgagatcgaaaatgcagatatttctattcatcggttttccttgttggcccctcgcggggccgttgtggttacatgttcggacggtagataaaacggcctacttcgccatattctttgctgtacagaataaccgccgcctggcgataggagcgccaaccaccgcgagcggcgtaagcgtctttggcccctaactggccgtgtacttcgtcaatccctaacgagtgctccgtgacggtctggtgatgccaatggcccgaatgcgtgtagatgtagtcgcattgcccgaactccttgcggaagtcagtagccattgcggcaaggcgcgtttctgccttcttcattgtgtggccgtgagtgtagcccagcatcgttttgccccatacggtgcgatgcagaatcgcagggctaacgtcaacgaatacgcgcggctcattttcatagaacgccgcgagcgctgcacgcaaccagatcatgccagcctgatcgtggttcccctcgattacctgcacctctacttccgcgtgattactcagcagtagcgacacagcgcggcgcaaggagcgaatagccacatagacaagtttcgcgtaacggctatcctgatcgagaacgtgaccacttgccggggttactgcgtccagtccgtcactgtgaaggaagtcaccgccgaccagcaagaccgcctttttcgactgcggggcaaccgaaacggaatagtcaaagaagcggttaagaaccctttcggctgtgctggtgtcgtagttctcgccgcattcgtgcttgtgggccatcgcgccgatgtgcaagtcgaagatcggatacagggcaagctgatcctcaatgaaaaacttcgattcatccttcggctgcggttcagcgcgcgggaggtcttcgcagaatgatgcttgcgccgcctccatcaaagcgatcatgcggtcgcggtctacttctgacttgacccagcgcacaacttcgtcaccgttcgcgcgaatcatggtcgatgtgcctttgaccccgaacccgtccgggatgtgtttcgctacgtggttgttaccgtgcaaatgcccctggcgggcaagtcgaacgcctcgacgctccacactgcgaacgttcatgccgaactcttcggcgatctcgcggtaggtcttgccttcctcgcgggcggctaaaaattcttcgtctgtgattttaggttgcataatttatcccaattgaattgcgtagttaaagattgcgatagtgagaaccaccgccgtaatcaggatcgcaatatatcgcattctcaacactcccgctacttgtaatattttttggtctgcttcgactcattaatgaacatcttcagcgcgtcggcctccgcccgcgtcgcaactgctatacgcgtgcgcttcagtgggcgctcatgaagataggtaaatttcccattgaacacaatggagatatccttgatatcgaaatactttgcgatcatcacgatatcgtcactaatgccagcctctttggcatgctgccaaacggcagcgcggccagattctacaatcattattcgtcaccataaatgcagaagcattccgccatctgctcatacatgtgaatttcttcgatgccgtgggctgcgcggaagtagattgcgccgatttcaccatcaaggccattctctaaaggcttcgccacgtagtcggccatgcacaggcgagaaaggttaatcaggtggcgcgatacgatgtgcggcttaacttgtgcgatcttgatggtgtcggcaatggttttggtgttcatggcgttagctcctgattggttgatggaacaataatacccgctcgcggcgggcattgtttagcaattagtgctgtttcgcgaaatattccgcaccttcacgcgcccgaaaatccagcaattcgcgctcaagaatcgcgggccagtcagcaagcggcgtgccgttatccatgaactcttgataagtgccgtcgatgctatcggcgaaggccatcttttcttcatccgtaccgatgaagccgtacttgtccagcagggtaacgacgatgtgtaggtattcggtgaaagattcaagctgttccatttttcagatcccacgtttgcgcatgcgctttttagttaatgacgggcagatttcgcttaccgggacgtagaacgttttttgctcctcgccaggcttgagtttgcgcatgatgaaaatcacgctgcccttgttgttgttgtcgactggtttcccgcttaggccgttgatgaaggccaggcgaccggatcggcttagttgcgttccgtcttcgtcctctgtgacgtctgcgacaatccaaataatctcagccgctgccttctgtgcgtcgcggaaccacgcagtagagttgtcgccgggaagcaaaatatcgatctggttgtcatgctccatctgctcaatggctttcagcacaaagggatccgggaacgagtaaggcgggttaagccatacgtgcttatttttcccccaccagcgcttgaggcaatctgtcttttcgtcgtaaaacttcgggcagacggtgttgctttcctcagcggcggcgtccaggtcgtatggcccgtaacgctcctccatgtaagcaataaggctgcgatcggttgaccacttgtcgcggacgatatccggcgtcttgctcccggcgtagcggttgcccgttacctggtagaatttatcaggcttgacggcttgatagtgtccgccagtggcaagcgcgttgcctatgaacgtttcacgttcaagctgttcaaacgtcgtgaacgcgtcgtgagtgtctttgtcttgggtgtcttttgccattttaccattccttacctgtggtggttacggttccgctgatctcgttaccgttcttttcaaggccagcgaagcgcacatcgacttcaccagccggaacaactacaccgtttttccattttgcaacacagattccatgcgttgaggttgcgcaccagccatcggggcggggtgatgaagtgcaaccggacaaagtgattacagcgacaattgcgactaataaagttttcattatgtttctccgtgattcgtttcgatgggagaatattacccgactcgcgccgggtagttttaacaaaaagtgctatttgattgcgtcttcaaacgcgatcttaaactgctcgaatccataggccacggcagcgaacccgccacggcttcggactgatgcgaggaattcccgttgctccttgctcactggcgacgcctgggatttaccctggcgctttagctcaatggcggcgaacgggtatttgccgcccagcccaatcagcacaaggatatcgcttacgcctttaagcaatcccatttgatgatctgcaacggcgctcgccttgtgcttgctgccctcgttgaccgtatgccagaacagataatcggggtattcgtaacgcagccaagaaacgctgttcatctggtctattttttcaagcgggcaagcctttacaggcccgccgtaatattcgaggtaatcccctttgtctgtaatcactcctcgcctccaaagtctttgcgggaaataatgtcctccttcttgccgttgatgcgatgcgttacgcgcttcggcgcgcggaagtattccgcatactccaggatcttgcgggcgtttttcatgccgcccaacttgccacgcattacagcatcatcaacatgctggaagactgccttttgtcgccacaacttaccgcaaatcgcactttctgactcagggaagaatttttccctggccgtgaaccgctcgccgtcatggttgagcaacacgtaattaaagatgatcccgctttggtttcgtgtcaatcccaaatcaaagcctacaacctgataccagtcattttgcgtgtaatgcttcccggtgaggttgtcgttaggatccttcaactgcacgccacaacatctgcactggcgcgccacaatgtcgttttcagcgtggcatcccttgaccttgattttccccgtcctcggatccttttggtcttcgcagcgctgggacgtccaaaaatattcgcaccgattgccgttgctgtccttgtggatgcagcggcgggcgtactcgctattttcgcctttgcagacagggcaaattttcgggccgttcttgctgctcttgcgcttctgatactgcgcctgctccaaaatcggatcgaaatacaactggcccaggtcatccattgttccggcaaaatcccagacaaggtgatcttctttgacccacgaataaggcgcttccttttgccagtctttgagcaatcgcattccgcgacccaaaagctgaatcagcaacgtcagggaaccgatcttgcgtaggattacagaaaaatcccaaaacggaacgttaacgccagtcgttagggccatcacctggaagatgtacttaatctcgccccggttcgccttgtccagaatttcgccgcgtttcttcgagttcgtcttctctgtgatgatcgcgtatgtggcgtccggcggtaagtagctcgccgcctccttacagtggagctggcctgcgcaagtgataagcacgccgtttcgcgtctgcgcacgctcgaccaccttctgcataatcagcttagtcatttcgccggaatcgtggattttcttctccatcttgcgcaagtcttcagcgctaaaatcctgcgtgccgtcctgactggagccgtgaaactctgacaggtcgtagcccaggccgtcggcctcagtgtcaccaaaaattgtcggaaccaccgaaccgaattcgacaaggtagtttgtgttaatgtccgtgatctgctcgcgccagaaaccaggctggctcttgtcttcctgtaagatcggaattacgccgcgaaactccgaacccgtatagccaacaatgcgaagctcgcgccccgtcttctgaaggcaacggcgcattaactcaataattacgatggtgtattgagtgcgcccgccaccaaattcaaccgtttcgaacttttcgttatacgggtaatctgcatcgacgatctcaccattcacgcgataaggcttatccttcgcgcgactcatgtactcgaaggattcatcgttcgcgatagcttcggcgaggtcttgccagtcaacctgatggcattcgtcgattgccaggactgaaggcacgtaatcgcccagcatcttaaacaggccattgaccaccgtaccttcggagccgacgacgatcgggaagtaagccgcctttgtgcctaacccggcgcaataaacggagtttggcacgtcaagattgctgatttcttcggaatcctgcttcacgatctcagcctgcctggcgagaaccatcataggcaagttcattgttttacactgcgccgcgagcatggctatcatgatggttttgccagcggatacggacgccttaatgtaaaacggatgctcatagttcgcgatccgcttcgccgtctcgatgtacgcgacagcctggtacgggtacggaacgatatttccgaccgtgaaccgcttttgaatagatgggatcttgtctgcgtaggcttcaatttgttgttcaattgtcagcatggttaatcctgatttgtcattcgcatggttgcgtgtataatacagagcaaattttatcgtgtttaacaaaaagtgctgtgaggttaaattatggaacaaatggcaaaggtagacaagcgaactttgaacggcaataacgggacatcacgcgggaaagataagaagccccgcaagaagccgacaggctattatgtcctgaaggatgaagtaagggcgggactgactaccagaatggaattggtgatcgaggcatacggcggcatcgccaaaaccgcaaaggagttgggtgttagcatccaggttgttcagcagtggattaagcgcggtatgatttcagccgacggcgcttacctggtgcataaaagttaccgccgcaatgactgcaaaggcttcagggcttcattttgccgcccggatctcagattcgacagcaacggcaagccgattacgcgccgctgcgaccgccgcgaaatgctccgcgtagtccgatagcacaatttgactaactaccaaacgcctaccgggttatgattctcgcgtgggcgttttttatttggaggttatgacgtggatttttacgacgaaaaagaggttttgccatacatgccggggatgtggcgcgaggcgctacaaaatatttgcggcatccactcccgatacttcaacggcaaacaccaggactgtccgaactgcggcggcaaggatcgcttccgctggacggacaaattagagaatcgcggcgacggcggggcgtattgcagcggctgcggtgctgataaggggatcggatggttgatgaagttaagcggcgagccgtatagcgagtgcatcaacattcttgggcgatacctgggaaaagttccgcaagagtacgtagttaagcgcaacaagcaggttactcgcgataacgggtacgactacggcaagatggcagatcacgatcgcgtcgtggcgataatgaacagaacagaggccgtcgatagcacgcctgtaacgctctatgagggcattgaaaatgagttcgttgaatcataccgggttggcgtaaaaacccacgagaacggcaggcaagagctatttcatgcactcccgatgcaactggtacatgaagacgggccggacgatgaatactgcaacatcttattcattgatgaggagggccgcgagaagatgttagctggcgacctgactttcggatcggtgatcgtaaccaatcagagcgaaggcggtaacgggccgatttacctggctcgctcttgggtggaggcgatgcacttcaatatcgcaagctcgtttaagtgtgacgtgtgggcatgcatcatcccgtccaacgttgagatcgtggcctaccgatataaaggaaagggtggcggcgaaggcaagcgagaattgcgagtcgtatgcagcaggaaagatcgggatatgctggcagcggctgaagaacgcgatatgaaagtgatcgtgccgaacaatgacaacttcaaaggcggatttgaacgaaagctctacgtggcatcatcccttctctgattaaaacgtgaacaaattttgggtaagattgatgatttcagtcttacctttttttatgcacaaaattcatcaacttaccaactggtcgaccactttaagtaagattaggtaagatgcatcttacgtaaatttcgctcattttttaaccaatatcgcaccatagaatatatataagtatatgatatctaactatattattattattactctctctctatctatctgtgtaggtaagattttcttcgggtatatgtattttgctttgcgattccgctccaatttttatgtgaatatttacctataggcatcttaccatcttaccgatttgcgttaactccatgaaatatataaagaaaatcacgtaagatgcatcttactaaatcttacgtaaatttcgctcattttttgaccagttgtcgaatagcactttttgccttgcacctggaatcgtgatgcgtatacttaacgcaacgaaaccacaaacggagtgataccaatggctgaagcaatttttaaggcatacaccaacgcggaattatccaacgacgattaccacgatcctaactcctggtgcgccagatacgttagcggctcaagcctcggcgagatttacgcaacctccccggcccactggaaatacaaggatcgtgaggagacagccgcgctttcattcggcacttgctcccatacctgcatgcttgagacgtccaaatttaatggcgagtacctgcgagcgaccgcgccgggcgacgttaaggatctgattacatcgaagtcggcattgtctgcgaaattgaaagcgtgtggcctgattgggacgtccaacaaggactaccccgaattgctggaaatggcataccgcgccgggattgatgttaacgtgtggtgggcgatcgaactctgcgacgaaagcgccgccatcaactcaggccggaagctggtcaaggattccgatttcgatgcggttgtgcaaatgcgaagcgtgatgctggctaacccacggcacgcggcgtgcattgaatcggatacggcgcaacgcgagttgtcaatcttcggcgagattttcggcgttccggtaaaagttcgtctcgatcatgttgacgtcgtgtcggatcccgaactcatcaaagagtgggggtttaacccggatgaagttttcgaagtggtggtgattaccgactacaaaactactcagacctctaaaccggatgacttcgggcggctggcgttcaacctgggctactatctcaaaatggcattgcagcgcgatctgttcgttaagacgtataacgaaaaacgcccggtagttgtccgcctgctgacgcaggagaaaaaatcaccgttcgcgcctctcgcgttcacgttaacggatcagcagattgagatcgggcggaagcagtatcaaagcgtgattcaccagtacgccgaatgcgtcaagcatgacgtttggccgtcatacgaatcgaacgcagcggaagtgaagttgcccacgccgcaattcgtgaaatacatgttcccggaagtatacggcacaaatagctaaacactacggcgcacttgtgatatagtgcgctccaccaatcaggaaaaggaaagtttgtcatgcgtacatctgaaagtttcaaagagatcgccgttgcgttaatcaaagctaagtctggattcgtcgctgcgaagaaaagcgggaagaatagccaccttgggaacacatacgccaatctcggcgatatcctggacgccatcgggccatcgctggaaaagaacaaaattatggtcattcaatcaatgatggataccagcaccgacaaggttatgcaccttgaaacgatgttcctgcacgaatctggcgagtggatggcgtttcagttcaacatgccgatcagcaaaaccgttgagcaagcgtatggctcgaccacctcatacgctcgccgttatgcgttagccgccgcgctgggcatcaagcaggccgacgatgatgcagagatcgcgaagatgaagccgcaagacttcaaaaaacgcattgatgcgtgcgaagacctcgaatctctccgcgagatttacaagctggctaaacagacgttgacgcctgcggaatggaaggtgacggaagacgatatcacgaagcgccaggcgcaactaaaagtgactccagcgaacggatttaaccccggaaagccgcaagaggttgcgaaacgtgagccggaacaggtagaatcaaagcctgaacctgaagcacaagatatctcatctttcaactaatttaaccgggcgggaaaccgccccataggaaaaacaatgcatgttgtaacaggggtaatccgaaaagcgccttacgtaaaagagggcagcaacaataacgggccgtggaagatgtatgcggtcgacctgtcagagcgaatgaagatccgcaatcgcgaaggccaggacgaaactgtatacaccaactatcgcgccgtcttcttcgcgaaggaaagcatgattgcgtggtacgatgaagcgttgcaggtggacaaggttattagcgtcacctgccggacacttcagatcgtaaaccgcgagcacaacggcgcgacttacagccacaatgaaatgatcatgccgcaactggaattcagccagcgcgaaccaacgcagggcggcggtaatcagcagggtggttggggccagcctcagcaaccgaagccgcaacaacaacaaccgaagccgcaaagcggtggtggtaatcatggcatggatttcgatgatgatatcccgttctgatttgacaactaaaggggccgcaaggctcctttttttattgcttcattgatgctattatctgcgttactcaaccaaccaaaagaggtcttaaaatggcactatacagacaaggcaaagccgcgatggacgcaaacggcgttatcaccgggactggcacgaagtggcaatcagccttatcgctcattcgcccaggctcaacaatcatgtttttatcgtcgccgattcagatggcggtgattaacaaggttgtcagtgatacgcaaattaacgccatcaccacaaacggcgcggttgtcccatccagcgattacgcgatccttttaagcgactcgctgaccgttgacggcctggcgcaagatgttgctgaaacgctgcgctactatcaatcgcaagaaactgttattgctgaagcgttagaattctttaaagatttcgatctcaatgctttgcaggaattggccgatcaggttagggcggacgcagaatcatcggcgacaaacgcagcggcggctgaagcgtcaaaagatgctgcggcatcatcgcaagctgcggctgcggcttctcagactgatgcggaggcgtcaaaaacagcggcacagcaagcgcaagcgaacacgcagcagatctatgacaacacagtagatcttgtttctggcgtgcaagctccagataaactcagtcaaacaggaagcggtaaagcatggatgaagatcgcaaccgtaaaagatgccgggcaatcttattgctttgcacaatttattatcggcggcggggctggatttggcgctgctaacgttccggtcgatatcttctccatttctggcaggggtcttccggcgtcggcgttaacaagcgacaacattgatacgtggtttacacagcgcgctttgattagcggaaggcctggatctcaacgcattagccttggcgtggtgaaaaatgataacggaacgtttgatgtttatttgtactctcccggtggttacattcctaacctgtggctgaatcgcgtaaacatccaggccggaaactcatatattacagggccaattatcgatcgcgctggctatacgtggattacaacggagccagccgggattgtatataattcaccatctgattatttgatggctaacgatagcacgatcccgcgtaccaacgtagccaacacgttcagtcaaccccaagcgatcagcgtgcctggcggaaacgctacgctgaccctgaacggttgcgtggttcgcgccaataaccgtaatgcgatcgtgtactcaatccctgaaaatggtcagggaatgtacttccgccctaatggtgatctgaatagcgcaaagcaggttgtttttgatgcaacaaacttcactgttaccgggttgaacgccagctttagtaatgccgtcacaatgtcaagcacgctgcgcgttaacggatcttctaaccttcgcggcggcgttgatgttaccgcgtcgcaggggttgccactgaaggaaacgaccgccacaaacgggattggggttaactttatcggcgataacgcaacggaatgctctttcgggattgagaatactgctggcggatctgccgtgttccataactacactcgcggcgctaacaatgctgcaagctcaaacggtcagttaatcggtggttatggttcgcgtccgtgggatggttcttcatatacggaacactccaacgtttcccagcatttcttacaggatgggacttgttcggcgactaaccacggcggctggttcaggctgttaaccaccccgcttaatgaaacgatggataatcgtcggcagacgtttgccaccagcaataacggtgatttgtggatcggctatgatgttccgatggggacgtacaaaatggaaggaatttcttctggagggtcggagccgcttagttggaatggtcgcgggttaaagcagattaacaactcatcaaatgagttgaatttaatcaccccgcgcaatggtagcacctcaagcactgttattcgcggaaactcatgtaatggcacacttagttctcgcggttcgtcacagttaggagatgcgttctatgtcggctttggtgggcatgatggtaatgattgggttggtctgaaggccagcattcgatttgccccgtcagagggattctcagcaactgcaactggtgccgggatcacgttctcaacaacggcaactggaacaaccaatagggtagaccgttggaacattagcaacgctggcgttatgtacccaggggcggacaatgcatactcgatcggtaactcatctatgcgtgtttctgctgtgtacgcagcgaacggggcaattcagacctcagatgctcgcctgaagtcagaagttcgtaagtttaccgataacgagatcgccgccgcgaagctgttatctcaggagattggcatttactcctggctggctaaacaggctgaagaaggcgaagatgctcgcgagcacatcggtctgaccgttcagcgcgccatcgagatcatggaatcttgcggactggatcctatgcactacggattcatttgccatgacgaatgggaagaggaagatatcattattggctatgaggacgacgttaatccaatcatgggtaaaaaggaggccggggatcgttacagtttcagatatgaccaattaaacttgttcattgcaaggggtatcgaagcgcggctatcagccattgaggagaaacttgggatgtaacaaaggggccgattggccccttttcttttaatacatgttttcaataatgggaacgctcatgcctactaatcgatcctggacgacgctatatcttgacgtccagttagattttgtgatgccgctggcacatcttacgctgttaccgctcatcattaacccggcaaattttgccctgcaccgatcaccacttacccggcttctgaatccatacctgccaagcaaaatcattccagcgccgatatcctgataatcccacgacgggttatagaatcggttcctgaagataaacggacggcgaaccgtggagaatgtgcattggcccgccgcgttgaaaaagttcaatccggttcccgcctgtggcgcaactccgctggcgaaaatagccaccctcattgtaaccgtagcgtcgccctcctctccgttcgtttcattcctggcgtagatgttgtttccgtcatattcgaccgtcacgccgtctgcgctccagcgagcaaacaccatatacttattgcggtcgtatccggtatcgggagttcgccattgccctgtaaacgtgatcgttccggcccacacgcaaaacccggcccgcgttgagtcggggattgcggtaaagtcggtggaatcggcaatgtataacccctggccgctggccgacggcaggatctggcagattgtcaaatcatagagtcggtcacgtccccaattatctgaccaccacgtagaaaacgtaagctgggaaccgttctgcgagtacccgctttgcatcccgatagttggaacaaggttcgtccctctgttctggatggatactggatcgcgagggatgacgataatctgcgcccctggcacatatccatccacgttaaccactttctcatcccacgcgttagaaaccaggttgcaaaaagacgggcaacgcatgcccgccgtgatttgcatcgccggattaccatcgttgagatcgataagtaaaccgcttgccatattagaacctccctaaaacaattcgcccgccgccgtcaaggttgacggtgacgccgttaccattgattaccacaccgtttccgccatcaaatccgaagttaccagacgcagcaaacagcgcgccacgaacgacaacattattgaattcagacgcaccggatttgttgatgctccacccctgctggcccgaaatgaagttgttggactggatatactgtccgatcttggcgttggtaatcgaaccatcctgaataagcgcgttattcatgaacacctggtcattctgcacaacaaacggaagcgtgtaagcgccggatgccgcattgcggatgatagcaaatctatcggcaataaacagcacttgcgaaacaacgttgtttccttgtgcggtaagctgtaacgccatcccggaattatattcctgtccattgtacgttagccctaacttcattgtgtacatggaacctacgccatcaacattggcccacgaatccagcttttgcgccagcgctgcggagttctcgccgattttggcatctaacgctgcctcggacgttgcgcgcgcttcactttcgtttgcgatcgcctcgttaacctgcgtaaaccctgcttccatatcctccccaaattgtgtttgcaactggttaatttgggttgctcgcgtttcgctttcatctgccagcgcttcgttcaggatcgtaatctgtgacgtgatatcctcatcaatctgcgttttaagctgtgtgatctcagccgccctcgcttcagtctcgttagcgatcagcacagtggtatgcgagatttcagccttccgcttgccattctccttgcgcataactctgacgtctgcatcgttggctaacgcgttctgaatgatgctgttcgcgtagtcgttgagtttagacgcgctgtcctgtgcgctctcctgcaattccttcatggcgtcgctatccagaatttcatccaggatctgatctgtgataatgctaacgtcagtcgatgacatgccgcgagcgtaatcagtccagggcgaaacgttgccgatcctgtcgacacttcgcgccttgtaccagttcacatagccagcgggcaaaattgagtgccagtattcagccgccggataaggaatcagagtaagcaggcttgcatcctgatcggttccgctttgcgactggtaaagctcaatgtatgccgtatcctctgcgccttcaggcatggcccacttaacgcgaatcccaaagatttcattatccgacgcgaaaaggttaattggccctttcggcgctccaattttcccggtcagcgatgcactagccaaagcagaccacggagacgcgatattgccgccgctaatgcaccttacgcgcgcctggtattcgccagcataaatcccttcaatgtcaacctgcgttgtcgcagtgcgcggcacgttgttccagtttccgccatccttacgccattgcacctcgtaaagttttgcgtactgcacggcagaccagccgattaccatcgtctcgacgctcatcccctgcacaatgcgtgagaatgaactaatcgacacgttttccggcgctcccattgaatccgggtcaacaaccgacgttgggcggtcgtcagtgattacgccgttgtcgatcgcgtcgtacttgttcgggttgtattgtgtggctgtaatggcgaaagtaaattcgtcgtcatcgctccccttctcaatcctggtaacaacgtactgttcagccgccagttggtcactttcgatcaggaatacgctgtccggcgcaacgtcgaagttatatcccacgtttagcgtaagggtttttccgtctgctgatacgctggcaatggttcggcgcaatggcttaccgtcgtcagtgttcaggatcagagtgtcgccagccttcgcgtcgcagcggaaagccaggaaaacctgcgttcccgttacttccatgattcgccccgaaagcaccaggttaaaggccgattgccaatgcggatctgcaacgtaaatcacatcgccgcatgacgggatcatgccttcaaggccagtagaaaacgaaacggtggttgcgcttaggttcgtttgcagaatccagcgcccacggcggtttgcttctgtccgtctggtgcaaccgatcgccgtgatgcttgtcgggttgtggccgaaccgcattgcagcgtcagcgttgaatactggttcaacgtcctgttcgtactggttctcttcgtcgtcgaacatcacgttgcacgacgtgtacatcgttttttcgctcggaaaagttcgcacgaatacgccatcaacgacgttatcagcagtgaacaggtaaaccggatcgcgtggcttatcgacgataatcgaaaggctttccccgttgtagaacgtcattccacggaatgcggaacaaacatccctgaccaactggaaggcttcgacctgcgactgcacgaccatatccatcaggtaacgcggttccatcccgccgcgattgtccggcacaagctcgtcacagtattgcgacacctcatagagcgaccacttgtcgaccgggatccctaactcgcgctggtctaacccataacgctgattcatgatcaggtcgtaaagaacccaggccgggttgttgctccacgcccatttgaaagttccgtcccacgttccggcatacgtcctgttaacagggtcgtagttactcggaacctgaacaatcttccacttcttcttgagcgagattgtcgggatctggttctggaacagatcgctatcaaactcgacgtaaagcattgccgtcagcggatagcggaattttgcatcgatcacctcagcgtaggactgaacctggaaggcatcgaccaccttcaccccgtcagcgtccggcgtaattcggcttacgcggataagaacctgcgacgtgaagtcttgcggcaagttgacgcggatgctgcgatcgtaaccgccagtcgtgtttttaccgtcgattttgtcggtcaagtaggtttgatagctcgcaccgtcaaccgccatttcgatcttgtactcaacgaccgaaccgaccatatcgccattatctttttgcgtcagcacgcggggccataacaggcggaagcggatagcagaaagattcttgttcgataccgtcagcgtgtacggcgtgttaaacgtaacgtcgcgtgcaacctggaattcagcgcttgattcactgaatccctggatgtaactctgcgtttgcgtgccggggcgaaattctgcaataactccctcatagttatagctcccgtcttcgttctgaaccggaacgccgccgaaatgcaactgcttcaggctgaagtcatccactacttcaccgtcagaaacggccagcaataacttgatcttgtctttcgagatcaggttatcaggcatttctaccggggtgcgcggctggctggaaccgcccttgcgggccttgatattagtcatcgtttagcctcctgttaatagttttgcaattgtacacgacaaaaagcccggaggctatgcccccaggctaaaaagcgaatcgcttaattagttgttatcttcggcgtaagaccctgaaccgaacagcgcaccgccagccaatctgtaaccatatggcaactggattggataacccgccgccgtagtgttaatcggccctccgaaagcatacgacggtttattttccggcgactcgctcgctcgcatattgccgcccatctgcggtgcgatcatctgcattacgccacccaagaccattgagccaccagccataaaagccgccgacgaaaaagcgcccatagccgccagcgaaccgccaccagtgaagaaggccgcaaccataatcgcagcgccgataacgatctgcaacaatccgccgttctttctggccttcgggatggggatgattcggatctccttcgctacggcgaacgttgcaaagtcattcgtgctgattggttttccgtccgcgacgataccaaagcgcatgttagaaccaaccttgctctgcatgaaggctttaaacccttccacttggtaggatagcgcccgaatgcattcgccgactgaatcgactgcgaggttatggaagacaccgaaccgacgcccaagggagccggaaagtttaatcgtctttgtatgtgatgccatgtttaagatccttatgtctgcaaattaaaaccttgtgctgctcataccacccggaatagatatcgcggcgggatagcttgccgaaggcgtggtgaaggatattattgtttccaacgtaaatcccagcgtggttccacttttccgcctgaagctggaagataatcatatcgcccacttcgggatcgccagtgttttcgatgaatccatcttcgcgccagtagtcgcggtaaagatcctctttgtattccggcttccaccattcgaacggcaggcggcggtcagtcagcgtgacgccgtggcgcttgtgaaaatccatcaccaggccgtagcaatcatacgcgcccaaagcccaggggcgaccaatcagcggcctgcgcttcggttcgataatccgcatatcaccttctggaatcgacacgataacccacgacaagccagattcatcacagaagcataaatctgtggcgctcggaacggtggttgccccgtcgccagtgtgggagtgaacgaaggcgatcggctcgccttccagtgacgccagcgcgtactgtgtttcgtccggcattgattcgttctcaggatccggcgaaacgttatcgagtcggtgatatttctgcacacgtgatttctgcgttaccagccctgcgcactcatgcgggtaaacttccttcgcatgctgcatgatctgcattttgatttttggagttaacatattaccgtccgcttttcaaggttgcagtagcgcaaccgccaaaatccaaagcctcattgccgaaccgtaatcggcacgacgaaacaaggccaccgcaaacatcctggctgggatcatcaaccttattcccgtatttgtcaaagtatccgttttgcccgttgtaactgcatccctttccggttttgtaccagccgcgttgcgcccaataacaaacggtttgagtcaggcgggccggaatcatcaagccatccatatcgaagacggacgttagttcaaacgtagccttctgcgggtcaacctgtttaggtctttcgatatagtaaacgaaccgacgaaaatcgccctcagcgacgctaccatcttctttcagcaaatccttgaccaaaacccataccgtaactttcgcttgcatgaggccgttgtaggagcgaataagagcactcgcttgcgcatcgatattgctaaccgtcagcgttggcttttctaccgtgccatcacttgacattgcgataccgccgatcccaaacgggcgcgggccgtactgctcgccgcgaaacgtgatcgccttcggtttaagcgtgccgccgttaaccgctgccaaaagttcttcggttgagtaggcgacattctcgttgtggaatcggtagacctgaccgccgaactttgttgcgtcaatgtcaatcagcgttaagatctcgcctgggaacagcttttgcaagcagttcgcaaactcttttgaaacgttagttgtcatataaatttcctcctcttatcgactccagatcataggccaaaaaaaagcacccgtaaagggcgctttgtgctatccggctgaagagaacctttccgcaaactctgctgttacttcgcataacccaccgcccagcggcgcgagggtcacagagtctgccgttacgacgaatacacccattcttccatctggtgccgtccagataaagggcttcgttacgtgatcctgacaaaaatcataaacctcctcccaatccattccgccataaacgatcggaaccgtccggcgctttgtgttgataccactcgatgcagtctggatatatccgttaccgaaactaaccgctcgcacgttgttggaaacggcgactttcgccgcccctccttgaatttgagtacaccaggaaaaagaatccactgttaacccctcgttttctcgtttacgtatttcgcaatgcgtccgttttggctcaacgcctccgtgaacatatcattcacgatctgccttactccctgctctaagcccttgctatcctgaccggaacccatcgtgatgttcacgtcacccatgctaaacaccattgctgccgatgccgcaacattcccgccattcgtcacaccagatcctgacgaaccgttagagcctaccagaccgccggaagcatagccacgcatcagcctgtataaattttccggccctaatcggctggtcgcctctttagtaaagacgaattcgccgccatgcacaacgcctttaggttcgtacttgccaccgttgccagtatagccgccgttggcgaaccctttgctgaacatgctggcgaagctgaacgtaccgccaccgccgaacgcagcagacattgcattgaacagcgccattttgattagcatgctggtaatgtcattaatcacgctttttgcgaagtcgctaaagctggccttaccagtcatgacaaaatcagttagcacagtagccattccgttaaatgcgttttgggtgatgctcccgatattggagtacacgtcattaacttcgttgccaatgtcagcccaggcatgcgtgaatcccgccttccagtcaagcatctgcgcatcctgctgcgcgtaaaactgttcgcttgctgcctgcatctgcttaaattgggcgtcgtcaagcgagcctccgttattcttccagtccgccgccatctgcgcatttgccctgtagcgctcctgctgcttactccccatcccggcggtatcctgaagcgctttcgtcttctcagccatctggttctgatacttcaccgacttgtcaagcaaggcgttcaggcgctgctgccggacaatctgatcgcccacgatcgctttctgttccgccatagcgatgatactttgcttattggctaacatctgcttttcgctctgcgtcagcttacgcttggcgctcgcttcttccagcacctggaattttgcgacagtggtaaagtagtctttgcgctgctggctgattttgtcgtcaagccctttgtgctgctgcaatactttcaactgcgcctgcaatgacagcaattctgactgatactgttcatcgatcttaaccccggcgtctacctgctccttcctggcgtttcggttcttcaggatatccttttcttcctgatttaccttatcctttgttgcactgctgtagccgcctgacacgtttttgtttttggccgcgtcaatgtaacccatttcgcctttcgcgatccttgcctgctgctccgcaatggtcttcgccagttccgctgatttggctttggaatccttgattagctgttcttgctgtgcaagaaaatcattcccaaagtcacccataccaggcactttctgcaactgccgaccagcatcaacgatgaattgtgcgatcatggcgtcgccatccgtaatcagtttcctgataacgttgatgatagatgaaacagtgtcaacgataaggtttagcgcgccgacggtgtgatcacctacccacttccaggagtctgcggcccactttttaatgtcagtccacatcgtttcaagcggtgttgcgctgtctgcgatatccttcaggcgcttatccatcgtgtcagcaaagagtttagttgccgcttccgctgctgccgtctcacctttggttttgcgcaaagattcgatgtaggttaactgcccttccttcaggaaattaaactgatcattaagttcagcaagccccttaaccggatcctttgcgatagagtcaaagtaaccagtaatggtcttttcgctctccccggtctgcgccgcccattccgccgtagtcttcgtgatcgccttaatctggttgatgctgtattttccagattgagccagtgacgttgcgatcgcctgaatgcttccgacagtggccgatgatgttttgttgatttcatcggttagggcggtgatttgcccggtagttgttgcagcatagccaccagtcagcaccaatgcattcgctagatctcgttgcgacttccaggagtcgtacccagctttggcgatagccgcaagagcaacacccaaagcaaccgcgccaactgttagcgggttaatgtagctcaacaaaactttgaacgtgtttccgataccgccgaagctatccttgatttgcccgccttgctgaatagctactaaccatactggcatcccggaagcaagagacgttactacgtcagtgatctgcgccggaagttggcgcatcgccattttatattgacctgctgaaattccagcaagccccatagcattctgctgtttctttaacgcctgctcttgctgcttcagggcgttaatgaacggtgccgcttcagttgaaacgcctaattgtgccgccttcatttccagcagttcggcgcgagtcttgccgatcgaatccgcttgctgtttcaggctggcgacaaaatcacgcccggcgttggttgccttctgtttcgcctcagcctcagcaattgccgcgcggccttcttcggttagcgccaactgctgctgtctcagcttgttggtggtcgactcaatgacagcgcccaggcggaagaattccttgtccggcacaaggcccaattgccaggccttatccagttcttccgaagccttgcgcaagttagccattttcgagatcgtgggatcgatagcgctcgcgatgttgttgaaattggttttggccttttccgtggttttcttttggttctgcaacgctcggttcatttcctcagtctgcgccgtcgcgcgcttctcagcgtccgccagcgactgaagaccagccccggtttgttggctttggttcttcagttcggcaagtgatcgcaccgctctgtcaacctgcgacacgtcaacgccgaacgtcaagccagctactttatcagccatgttagcccccatatgaaaaaagcgcccgtaggcgcttattgtgattttttgtagatctgcttgaggtattcaccctctaggatctgcaagtcaagcaatgccgcttctcgattgtcgattttatacaattcaaagaacataggcaatgtattatagtccagccccgttgggccattcatcccaatgcgccattgcgtttgcatggcctggaatagttgccaactttgggcggtctgctcatcgaagaaaatttcctctaaatcagcctcgtaatccgatcgccgtaaaccatactcagcaagctggcgatcggttaactcaggctgaagtgttagataaacagcccgccttagacttttgcacgatgcccggcaagcgcggccatgtaggtttgaggcaatgccatgacaaaggaagggtaatgcgagcacagccaggaaatgttttcatccgtaaattcttcgtccagatcccagccttcggccatgaagcggataaaatccacgttacctttcggcgctttttcttcgctttcataaaactccttcatttcatcggtggagtgatgttttaccgtcatattgatggttgcatctttgccatcggggcaagtgaaagttaccggaagtttgaaggatggaagttcgccgccaatacgaattttaaacttagccattttgtaatctcctgattggtatgtattgaatgctattatgcataaaaaaaggcgaggcacaagccccgccagtaaattatgcgaccaccggaaggaagacgtgcgcacccttgagcgcaacatcaagcgttaccgtctccatctcgttgacagcagtagtcggaatgtcatcgaatgatgcagttccagaccaatagcgaacctcggacgctcgcgggacgtacatgcacatcgctttcgcctctttgctggcgtcggctgcacgcaacaccgggtagattgcgttattgtactcgtgcgcaaaagtgtagttaagcgtcaccgccgacttataggtaggctcggactgttcgcgctcgtcgctcaggcactggtagttataatactgctgctcgttgccgtctttgcccaaatcctgaatacaaggcaactcgatccagtcagtgacaacgctcacgcttccggttgcagccgtagggtatttgttagtgtcggaggtgtcgaactcttccagagttgctacaccagccgataccgacttgacgcgggccactttatttacaaagtcgctccaggtgcaatcggtaaagattacgatatcgttaacgtcgagcgcaccatctgccaccgtgatttttgggtttttcgcgtcgttggtcattgcggtaaacggaacctccgcaccgcgcgccttctcaaagaagacctttgcaccgtttggtaaatgcatgttgaatactcctgttttgatgtttgattaacctcgccattatgcccgctaattagctggatggcaagaaattataagcgcctcgaatcgccatgcgtaacgccactgtctccatttcgtttaccgtcgttgacggaatgtcatcgaatgagacgttaccagaccaatagcggttttcctttgctcttgggatgtgcatatacatagccattaatgacttatctcgttcatgtgctttcatgatatcatacgccggatttcccggatcgtgagccattgtataagacataaataacgctgatttcgtcgtcttctgcctctcctcccttccgctactcaggcactggtaagtataccagttttgctcgtttccttccttgtcgattgactgcacgcagggcagttccgcccatgatgaaatgcgacgaacctttccgggcgatgaaatgtaactaccaactggcaaatcattagctcggtattccggccacaccctaaccctcgaaacatccccattaacagagcggatcgagtatacgttaccctcgatcagcttgttgtcgcactcggtgattactacgatatcgccaacaccaaaagcactgacaccagccgcctgattcaatacgagaacataagtgtttgggatgccaacatcatttgtgtcaagccacttaaaatcgtactccctctcgttgctggcctcaataaaaatcttgctaccgttaggtaagtgcatacccgctcacctccatttgttcacatcttaccgtaaagcgaatggggaagaaccacccggtttgcgccttctgaacgccgtacacctccgcccactcacttacgtaaagatctaatttgtcatcgcctaagattttaccttcagggaaatattttgcaactttttgcgcgattaaccttgcggcgtcggtgccagttccgggtttaaagatcacatctacctgaaccagccccaggtaaacgcgacactccctggagaggctaacagatcgggaatccgcttcgacgtatgaaaatttaagatacgtaccgccgttggctggcggcttaaagtcaacgttatcgctcgcgatcataatcccgttatcggcggcaaatttagccgccgctgccttgcattttaacgcaatatcatagtgcatttttcgccctcgctcgtttgattgcttcagtcacgtatacgcccaatcggatcgcgacaactcccacaacgccattcggcgcttgctttgagtgtccgtattcgagcgcgttcgcatagattagcatgttactgaaccagatcgaagtaatcccggctccctttgtgaacagcgcaatattcgcgttgccgttctggatagtcttcgtcccggtctggtcgtatgcgttgatggcgtaaagtggtgcacggttaaaagtgatttgccagttgccacggaagcggcctgtatcgaccggagaacgcatcacaagatcctttagtatatcctcgcacgtcatgcgtacaacgtcctccagcgcatcaccagccgccttgcaccatgcatcaatcgcacctgtgaattcacggatggtgtaattagccataagtcgccacccttcgcaaaacagggcggtaggcaacaacggttccggtaggtttcaccgggcgggcattcactacgcggtagcgctcgccgtcaacgtcgatttcgtcaccttccatgattggtacgtcgtgagtaaagaagccgcgcttgtcgccagctaggatagtttcgccgttgatatcgcgatctttgatatcccgcaccgcacctttgattgtggtcacaacctcgccagggatgatatcctccccggtttcggggtcgatgccgccgccagcgcctttggtgtacttgttgaatacgccatcggcatcgctgaaaaacttgatgcccgcactagcgcgggcctgaattgctttgtagttcatggcgtttaacctcccatgccgcaacgatgaagaccgccagcggtcataaggccgaagccgccgccgcgcattttcagcatgcgccagtacattttaccccacggagttgatagcatttcgttgtcactagccgaagacacgcgatcgaatgtttgggaaaactccccggtcagggtgaatgacgctacacgctgcgagtatgattccacgctttcgccttcctgcttcattgcgccgtccagaaacatcaggtgcatggtcatcagcgccaacgctgtaatgatcgaatctccgaacttagacgcgcatacgaattcctcagccagcaccacccacgcggttaacagttcttccggtacttctttaagcggcggcgcgaggctgcgcattttgtcgatcacatcttgaatagtataattcatggcctttctccagatatgaaaaaggacgccgtagcgcccttgttggtttttttattcggcgctcgtaggctgcacgatggtttttgctttcgctttcactgctgcgatgtagtcgcgagtgcggcgaatatcatcgtggaattctacgcggcctttgaagatatcgtggcggaagcggtcaacttgagactcttcgatctcgaaggtttcgcccggtagcactttcttgccgtcgaacttaatcaggcaagcgcccacgttttccattgttaccatatccggcttcgcggtttccggctgtgaggtttccggcttttcgttgatttccggttcgatggtagcagtatcttttttagccattttatatctctcctgttttggtgaggtttgatttaaacacaatgaaaggtttttcgcaacaataaaaaatggccccgaagggccattctaattacacgccagaaagaatggcgatagtcagcggacgatacacgatgaggccagtgcatttggaggtgcaaggcactttgaaatgcaggtctttcggctgcatcggcagcatgttgaagcgttccgggatctcgatcgacatattcatcggatctttttcgtatgccagcacgcctttagtacctgcgccgtcgatatcttccagttccgcaatcgcggtgatggtgacattcgggtagttctctttgaaccacgcgaggtaactttccgtaacgtccggcattttctgcgtcagcaggcggcgcttggacggtgggatcacgatgttggtaacatggtgacggcccagcgttacatcttcgatcgtctcgatcagatcctgcaactcgctgaatgcgatttccggcgtagtccagcttgcggaggtcaggcggttaatgttcggctgatcgaacacgctaacgatgttatgcggcgcggaacctttgaacaccagatcgttaaccagggtttcatggccttcgcgtgcaagagacgctttgcggtcgctcaggctggaacccagcgcctgacctgctttgatttcgtcgatggagataaaccacgcgttacccaggcggaacactttaccagttttctcggacgccatcgcttcaacggtcggcaggtcgtcggtataatccgcgatgattttcgcagaggtcacgccgtcaaactccagccattcaaagtttttcgttaccggactaagttcggtagtaaccgggaaaagctccagcacaccagtttgcgggtaagcctgctcgtactggcgatttaagagttgggtaagctgattaacagtccagatgccgtgcgcatcgagtttgttagcgtcgatgcccataccctgcattgcaaccttgattgcattctgctcgaatgcatctaatttcatagtcatttgaaactcctgtttgtgtgttttgacttaacgagatgaagaatagcacgaattgctaaacggtcaaaggtttttttaacgtatgaaaaaggggccgaagcccctatttttacgccccaccagtagcgggagcggctggcgcggttgcgtcctgcgttaactggattttcaccaggactacgccatctttgtttttgaaccactcgccagtgtgagtgtacccggttttgattaggccagcatcgccttttgccacggtgccatcatcgccgaaagttaccagcgacttaaacgcgcaatctgctgcggttacggtagatgcagcgcgacaccacacgcggccatgcgtcataacgtttacggcggaaaatttgtcgtatttaaattccggcgattggtaatgggaatgagtggttacgcccaccagaacagcatcagcagttttagcggtatcgaccactttatgaccatcaacaacgccaccggacaacgcgaccagaacgccagttaaaatgtcatttgcagcggcacaggtgccgtcgatgttgtacagcgaagtatccgcgatctggcccggaatgcaaatatcgcgcttgcgggtataggttgcaggaattgccatgattaaatctccttgatttggattttgtagcggcccgaaggccgcacggtattagttacggaatttggcttgcgggtcgatgatgttggaaccatcgagtttcggcgcgcctttcttgtcttcctgctcaccatcttcttttttggcgaagactttagagcgattgcttgccatcttatcagaattggagataaagtcaaaagaagcgtcgatatacgaatcttctttatctgacaagtcgcggccatccgcttctttgatgtaagcaactttcatcgctttaacgtccaggccgtcgcacttgatgccagcagcggatacgatcgcgacaactttctgcttcgcgtcttcgtcggctttgattttggcaacacgtgccgccacttcatcttcaatgccatcaactttggtttgaagtgcgtcgcgctctgcggtgatgctcgttacctgactggttgcggttgcgatctgtgcgtccagtttagcaatatgtgcgcctacgttatcggctacttcgacgtctacgccgtcaattttgataatcatcgttttagctcctttgtggtttgagtcgtcatcatagggaaattcttgctcactatcaagatttaatttcgcaattcctgcgcggccacgaaaaacaagcgccacatggttaacgcgaatcttcgtttgcaccgcatcaaagcgaacccaatcagagacggagtcatttttcagttcttcgaagttttccggtaggtcttcatcgaagtagtattcgcccgtcgcgttgttgccccagccttttttgtcgatatcgatcgaggtatacccaacggacaattcagccgctacgcgctgtttcgcctgctcgatcgactccccgtcgtagatcatcaccggaactagaaccccgatcccgtcctctttgccagcgccggaacaggatccgaccaccagccctttcgcgtttttggcgttgaccatcttgtgacccaaagtaattggcttgccctggtatgacgccagcgattcagcgtcgaacacctcggagcgcgggcgaaactcaacgcgcgggccgttaggggtctggtaggtctgtgcgccaatacgcgcaacgatcggggtatcgaccagaaagccgttttcatcaaagcgggcctttacctttaccgtgtcgaatctttgaactcttttcattgtaattcctctacgttattaaaatcgggaaccgcccagcaacggcaaccgtactcctcgccgggaaaaatgccgtcaccgtttacgcggcgtcgctta

SEQ ID NO: 19 - DNA, 50045 bp, Unknown
  source: /note="Description of Unknown: KP3W-S0102 Bacteriophage sequence"
acgtaagatgcatcttacctaatcttacttaaagtggtcgaccagttggtaagtcgatgaattttgtgcataaaaaaaggtaagactgaaattatcaatcttacctaaaatttgttcacgttttaatcagagaagggatgatgccacgtagagctttcgttcaaatccgcatttgaagttgtcattgttcggcacgatcactttcatatcgcgttcttcagccgccgccagcatataccgatctttcctgctgcatacgactcgcaattcccgcttaccttcgccgccaccctttcctttatatcggtaggccacgatctcaacgttggacgggatgatgcatgcccacacgtcacacttaaacgagcttgcgatattgaagtgcatcgcctccacccaagagcgagccaggtaaatcggtccgttaccgccttcgctctgattggttacgatcaccgatccgaaagtcaggtcgccagctaacatcttctcgcggccctcctcatcaatgaataagatgttgcagtattcatcgtccggcccgtcttcatgtaccagttgcatcgggagtgcatgaaatagctcttgcctgccgttctcgtgggtttttacgccaacccggtatgattcaacgaactcattttcaatgccctcatagagcgttacaggcgtgctatcgacggcctctgttctgttcattatcgccacgacgcgatcgtgatctgccatcttgccgtagtcgtacccgttatcgcgagtaacctgcttgttgcgcttaactacgtactcttgcggaacttttcccaggtatcgcccaagaatgttgatgcactcgctatacggctcgccgcttaacttcatcaaccatccgatccccttatcagcaccgcagccgctgcaatacgccccgccgtcgccgcgattctctaatttgtccgtccagcggaagcgatccttgccgccgcagttcggacagtcctggtgtttgccgttgaagtatcgggagtggatgccgcaaatattttgtagcgcctcgcgccacatccccggcatgtatggcaaaacctctttttcgtcgtaaaaatccacgtcataacctccaaataaaaaacgcccacgcgagaatcataacccggtaggcgtttggtagttagtcaaattgtgctatcggactacgcggagcatttcgcggcggtcgcagcggcgcgtaatcggcttgccgttgctgtcgaatctgagatccgggcggcaaaatgaagccctgaagcctttgcagtcattgcggcggtaacttttatgcaccaggtaagcgccgtcggctgaaatcataccgcgcttaatccactgctgaacaacctggatgctaacgcccaactcctttgcggttttggcgatgccgccgtatgcctcgatcaccaattccattcgtgtagtcaggcccgcccttacttcatccttcaggacgtaatatcctgtcggcttcttgcggggcttcttatctttcccgcgtgacgtcccgttattgccgttcaaagttcgcttgtctacctttgccacttgttccataatttaacctcacagcactttttgttaaacacgataaaatttgctctgtattatacacgcaaccatgcgaatgacaaatcaggattaaccatgctgacaattgaacaacaaattgaagcctacgcagacaagatcccatctattcaaaagcggttcacggtcggaaatatcgttccgtacccgtaccaggctgtcgcgtacatcgagacggcgaagcggatcgcaaactatgagcatccgttttacattaaggcgtccgtatccgctggcaaaaccatcatgatagccatgctcgcggcgcagtgtaaaacaatgaacttgcctatgatggttctcgccaggcaggctgagatcgtgaagcaggattccgaagaaatcagcaatcttgacgtgccaaactccgtttattgcgccgggttaggcacaaaggcggcttacttcccgatcgtcgtcggctccgaaggtacggtggtcaatggcctgtttaagatgctgggcgattacgtgccttcagtcctggcaatcgacgaatgccatcaggttgactggcaagacctcgccgaagctatcgcgaacgatgaatccttcgagtacatgagccgcgcgaaggataagccttatcgcgtgaatggtgagatcgtcgatgcagattacccgtacaacgaaaagttcgaaacggttgaatttggtggcgggcgcactcaatacaccatcgtaatcattgagttaatgcgccgttgccttcaaaagacagggcgagaacttcgcatcgttggctatacgggttcggagtttcgcggcgtcattccgatcttgcaggaagacaagagccagccgggtttctggcgcgagcagatcacggacattaacacaaactaccttgtcgaattcggttcggtggttccgacaatctttggtgacactgaggccgacggcttaggctacgacctgtcagagtttcacggctccagtcaggacggcacgcaggattttagcgctgaagacttgcgcaagatggagaagaaaatccacgattccggcgaaatgactaagctgattatgcagaaggtggtcgagcgtgcgcagacgcgaaacggcgtgcttatcacttgcgcgggccagcgccactgtaaggaggcggcgagctacttaccgccggacgccacatacgcgatcatcacagagaagacgaactcgaagaaacgcggcgaaattctggacaaggcgaaccggggcgagattaagtacatcttccaggtgatggccctaacgactggcgttaacgttccgttttgggatttttctgtaatcctacgcaagatcggttccctgacgttgctgattcagcttttgggtcgcggaatgcgattgctcaaagactggcaaaaggaagcgccttattcgtgggtcaaagaagatcaccttgtctgggattttgccggaacaatggatgacctgggccagttgtatttcgatccgattttggagcaggcgcagtatcagaagcgcaagagcagcaagaacggcccgaaaatttgccctgtctgcaaaggcgaaaatagcgagtacgcccgccgctgcatccacaaggacagcaacggcaatcggtgcgaatatttttggacgtcccagcgctgcgaagaccaaaaggatccgaggacggggaaaatcaaggtcaagggatgccacgctgaaaacgacattgtggcgcgccagtgcagatgttgtggcgtgcagttgaaggatcctaacgacaacctcaccgggaagcattacacgcaaaatgactggtatcaggttgtaggctttgatttgggattgacacgaaaccaaagcgggatcatctttaattacgtgttgctcaaccatgacggcgagcggttcacggccagggaaaaattcttccctgagtcagaaagtgcgatttgcggtaagttgtggcgacaaaaggcagtcttccagcatgttgatgatgctgtaatgcgtggcaagttgggcggcatgaaaaacgcccgcaagatcctggagtatgcggaatacttccgcgcgccgaagcgcgtaacgcatcgcatcaacggcaagaaggaggatattatttcccgcaaagactttggaggcgaggagtgattacagacaaaggggattacctcgaatattacggcgggcctgtaaaggcttgcccacttgaaaaaatcgaccagatgaacagcgtttcgtggttgcgttacgaataccccgattatttgttctggcatacggtcaacgagggcagcaagcacaaggcgagcgccgttgctgatcatcaaatgggattgctcaaaggcgtaagcgatatccttgtgctgattgggcttggcggaaaatacccgttcgccgccattgagctaaagcgccagggtaaatcccaggcgtcgccagtgagcaaggagcaacgggaattcctcgccgccgtccgaagccgtggcgggttcgctgccgtggcctatggattcgagcagtttaagatcgcgtttgaagacgcaatcaaatagcactttttgttaaaactacccggcgcgagtcgggtaatattctcccatcgaaacgaatcacggagaaacatcatgaaaactttattagtcgcaattgtcgctgtaatcactttgtccggttgcacttcatcaccccgccccgatggctggtgcgcaacctcaacgcatggaatctgtgttgccaaatggaaaaacggcgtagttgttccggctggtgaagtcgatgtgcgcttcgcgggccttgaaaagaacggtaacgagatcagcggaaccgtaaccaccacaggtaaggaatggtaaaatggcaaaagacacccaagacaaagacactcacgacgcgttcacgacgtttgaacagcttgaacgtgaaacgttcataggtaacgcgcttgctactggcggacactatcaggctgtcaagcctgataaattctaccaggtaacgggcaaccgctacgccgggagcaaaacgccggatatcgtccgcgacaagtggtcaaccgatcgcagccttattgcttacatggaggagcgttacgggccatacgacctggacgccgccgccgaagaaagcaacaccgtctgcccgaagttttacgacgaaaagaccgattgcctcaagcgctggtgggggaaaaataagcacgtatggcttaacccgccttactcgttcccggatccctttgtgctgaaagccattgagcagatggagcatgacaaccagatcgatattttgcttcccggcgacaactctactgcgtggttccgcgacgcacagaaggcagcggctgagattatttggattgtcgcagacgtcacagaggacgaagacggaacgcaactaagccgatccggtcgcctggccttcatcaacggcctaagcgggaaaccagtcgacaacaacaacaagggcagcgtgattttcatcatgcgcaaactcaagcctggcgaggagcaaaaaacgttctacgtcccggtaagcgaaatctgcccttcattaactaaaaagcgcatgcgcaaacgtgggatctgaaaaatggaacagcttgaatctttcaccgaatacctacacatcgtcgttaccctgctggacaagtacggcttcatcggtacggatgaagaaaagatggccttcgccgatagcatcgacggcacttatcaagagttcatggataacggcacgccgcttgctgactggcccgcgattcttgagcgcgaattgctggattttcgggcgcgtgaaggtgcggaatatttcgcgaaacagcactaattgctaaacaatgcccgccgcgagcgggtattattgttccatcaaccaatcaggagctaacgccatgaacaccaaaaccattgccgacaccatcaagatcgcacaagttaagccgcacatcgtatcgcgccacctgattaacctttctcgcctgtgcatggccgactacgtggcgaagcctttagagaatggccttgatggtgaaatcggcgcaatctacttccgcgcagcccacggcatcgaagaaattcacatgtatgagcagatggcggaatgcttctgcatttatggtgacgaataatgattgtagaatctggccgcgctgccgtttggcagcatgccaaagaggctggcattagtgacgatatcgtgatgatcgcaaagtatttcgatatcaaggatatctccattgtgttcaatgggaaatttacctatcttcatgagcgcccactgaagcgcacgcgtatagcagttgcgacgcgggcggaggccgacgctctgaagatgttcattaatgagtcgaagcagaccaaaaaatattacaagtagcgggagtgttgagaatgcgatatattgcgatcctgattacggcggtggttctcactatcgcaatctttaactacgcaattcaattgggataaattatgcaacctaaaatcacagacgaagaatttttagccgcccgcgaggaaggcaagacctaccgcgagatcgccgaagagttcggcatgaacgttcgcagtgtggagcgtcgcggcgttcgacttgcccgccaggggcatttgcacggtaacaaccacgtagcaaaacacatcccggacgggttcggggtcaaaggcacatcgaccatgattcgcgcgaacggtgacgaagttgtgcgctgggtcaagtcagaagtagaccgcgaccgcatgatcgctttgatggaggcggcgcaagcatcattctgcgaagacctcccgcgcgctgaaccgcagccgaaggatgaatcgaagtttttcattgaggatcagcttgctctgtatccgatcttcgacttgcacatcggcgcgatggcccacaagcacgaatgcggcgagaactacgacaccagcacagccgaaagggttcttaaccgcttctttgactattccgtttcggttgccccgcagtcgaaaaaggcggtcttgctggtcggcggtgacttccttcacagtgacggcctggacgcagtaaccccggcaagtggtcacgttctcgatcaggatagccgttacgcaaaacttgtttatgtggctattcgctccttgcgccgcgctgtgtcgctactgctgagtaatcacgcagaagtagaggtgcaggtaatcgaggggaaccacgatcaggctggcatgatctggttgcgtgcagcgctcgcagcgttctatgaaaatgagccgcgcgtattcgttgacgtcagccctgcaattctgcatcgtaccgtgtggggcaaaacgatgctgggctacactcacggccacacgatgaagaaggcagaaacgcgcctcgccgcaatggctacagacttccgcaaggaatttggtcaatgcgactacatctacacgcattcgggccattggcatcaccagaccgtaacggaacactcgttagggattgacgaagtacacggccagttaggggccaaagacgcttacgccgctcgcggtggttggcgctcatatcgccaggcggcggttattctgtacagcaaagaatatggcgaagtaggccgctttatctaccgcccgaacatgtaaccacaacggccccgcgaggggccaacaaggaaaaccgatgaatagaaatatctgcattttcgatctcgatggcacgttgtccaatggcaaccaccgtttgcacctgctaccgaaaaaagatctccacctaaccgaaagctggacggcgttcaatatggcggctggcggtgacgctcccattacggacacgatccgggtaatggaggccatgcgcgcagccggatttatcgtcatcatcctgaccgggcgaagtgatgaggcacgcgagatcactgaaaaatggctggtgcaaaatggcgcatcgcattacgacctgctgattatgcgttcagcctccgacaaccggaaagatacggttatcaaagaggaaattttacgcaagattggcattgagcgaatcgttgcggcgtgggatgatagccccactgttattgcgcacttccgtagccttggtatcacaacttaccaggtctgcgactacggcgaaaaccttcacgaccatctgaaatctcatggagtagacaaatgaaaaatgtaatcatcctcaacggcgcgccgggcatcggaaaagacaccatcgcggaaatcatcgcccgcaaatgggagtatcggatcctaagtttcaaatcaccgatgtttgacattgcgcgcgccatcctgggtgcaaccgactttgcccgattctccgtccgttaccacgatcgcagccggaaggaagtcaaatgcgactttttaggcgaccgctcgccgcgtgaattcctgattcacattagcgaaaatttcgtaaagccgacgttaggcaaaaagcagttcggcaagttgctttgcgattccgcgttggtttcgccgtttaactgcattgtcagcgacggtggttttgatgaagaggtcgagcacgtcgcagcgcatgatgcacttaacgtttttgtcgttcgcctccaccgcgacggcatgacatttgcgggcgacagccgcaagcacattcgacgccccgatctgatttgtgacacgtatcacgaacttgattttgatatgacgactggcgagcctgaagatgatgcacagaaaatccttgattttgtttctgacattgcattaaaattgccggattaatgcctttattatcaccgccttaaactttgggagccttaacaggctcccttttttttgttctttatttggcccaacgcatatatcatcgcattatcacttaactaacagaggttgcatatcatgcgggaattcatcaacgcggcaaccaatggtagcggcggtgttaccctcgcaggctctgcgaccgggcaacttatcattgcggccattggtttatttttcatgattctattcggctccttcggcgcgtggttgcgctggcgagattcaaaagcgcttcgtgaagcgctggaagccggggatatcaaaacggcggtgaagatcaggagtaaataacatggggattaaaacgcgggttacattcgcggcggcgatggcgatcgctgtcgccttcctcccgaaagtggaggacacgaaatacaaagtttataccgatatcgctggcgtttcgacggtctgcgaaggcatcacagggccggacgtaatcaaggggaaaacctatacccggtcagagtgtgatgcacttttggcgaagcacatccaggtcgcaaagcgtgtagttgacagcaaaatcaaagtggccgtgccggacaccttcagggcgtcgatgtatagcttcactttcaacgctggcggtggcgcatactccggcagcacaatgctgaagttaacgaaccaggggaggctgtatgaggcgtgcgaacagctttaccgctggacgtactatcgaaacccgaaaacgggcaagatggagaagtcgaaaggcttgcataatcgccgggttcaggaatatcaactatgcattaaggatctgaaatgagcactttaaactttcaacgagctttggcaatcggcttcatcgtgtgggcggttgcactggtttccggttgcgcttccagcgtcccgatcctttccgatctggttggcagcaagccggatatgacggcgcaagtcggcgcggagaacgtgaaacaggcggttggcgtgacgaacaaaacggacacgtccagcaagcaggaaacgaccttcaaagaatcggcagttggcaaggttgacacgtccaacaaaaaggcggtgacgacctccagcattcacgctaaccagattacggcggagaagatcgagatccgaaacgacgatagcggaagcatgattccgtggctgattggtgccgttggggccatcatgttagctttcggtgtattcggtatgtggcgagagcgaaaaaataaaggggcgtaagccccttttttcatatgtaccgtttgacgtgcagaagtgccacgccatcttcatcattcaacccatgttcaaccgtgtttgtcgcggccattccttgatatagcaaggtgagcgcggcacgcaagtaattttctggtgtgatctgattcacgcaaacaagcctgtgaacctccgttatcagatcttccacctgctttcccgaatagggcttcatcgtcgagttgctcaatgtgcatcatctcccacatgtatttgttgtccatcccttcaaacgaccggaagttaaatccaatctccctgttatccgggccagtacaccacaccacgccgttttttccgtccaggtatccattcgtatagcttcgcgctaaaaactccttagaaaccattgaggcgaacatacggtgtgacacgttggcggcttttgccatgcgtggcgattcgcggtgcatgtaaacgaaattcgcaaaatcttgccgggtgaattcccggcgagactcgcagaatcggtaaatgtcaaggataaacattcattacctcatgaaagaagggttaataaagacctctgaatcaatcacgcagatgaaccctaattcctccatcttcggcagcaatttttccttaatccttttgctcaccccggactgacctttgaagatcttcagattgcggcacgcgttatagatgctctgaaccgtcatcacgcctttcgcctgcttgccacggctggcgataacatcgtacaccgccttaatctccgctccctcaccagcgaagccggacgaatcagccgacgacaaatacgttttgctcaactcatgaaacatgatgatggcttcgtcgatcgtttcggttccgatcttcttcgagcgcttgccgccaggttgccagttgcggatcgtgtggattaccgacgccaggcgcatcacctgcttatcgaatttacccatcgcaccgcgcagcatcgtatgcgaatacttcccgccgtcgcccaattccggctccaactcctggcgggccttgttcagcctacgcatgcctgcttcagtcacttccagcttgatatacgattccgtcataatgtcatgaatgaggcggaagtaatcagcgcgtaaagacttgtcgatcggctcataggtcgaattcccgttttcgtcaatgaacacacgctcacctaaccgcgtttgctcgcgaaccaaaaggaaacgctctgatacaccgataccgcgagaaccagcttgcatgatggcgtcgatggtttcatcctgggcgattacgcaaatacagcccagcgcgacgaatgacatattgttactgacgtcggaacgtgcgatcgatacgtggcccttatcccacgccttcaacacaagttcgctgttcgtcttcttgccgccgtcgttgccatacgtgatccctaacaggctgttaactgccgtcgcttcgtccgagataaccgcaaagtttccttgccgattgttgattttcgccaggccttccggcgtggtatcggagacggggaaggtcagatcgcacatgctttctaacttctcctcaagttcgtctttgtcttcgaacagtttcgccatatcagactgcgataactcgcctttcatggcctgcttgttggcggacaacttcgccatgattttcttgcgctctttcttgcgcgcctcgttgattcgctcaacctctgcgacgatcggatcgatagccagcgagttaatcgcagacttaccagcggaaggcggctgcgacgtaatgacataaagcgtcgttggttgctcgctgccgtggtactcaacccaaaagcgacccatcatcgcggcggacacggttccgaggaaatgcatataagccgatgattccgggaattgaacggagcgagcggcgttgagcgccagctttccgacgatatcgtaatcatttgcgatcgagatcgtgggatacttgtccgcgtttacgtcgatatctttcggcttgggccagaaagaaactgagtcgcgatacccgttcgcacggatggcgacgcgcaaggggctggtgccttccctctctgcgatggcaataatatcttgtggggacacgcggtcatttaaaaacatgccttgctcctgattggttaatcgtgcggctaatgataagccgtcttaaatccgagatccagtgataatctaaacgcacttgcaaaatgtgcttaggttatcggggcgcatggccccgaatccgttacaggtatttcgcctcaaacgtggttccgtccgacacgctgaaaccgacttcctcacggtagagcgtccagcggcaaccgtcacggtcgaagatgtacccggcgacgccgcccagagctcgaccactttccacctggtaacgcttgccgacggtgaaggattttttcaccgggtttttgtggtcgaggccaacgcatttcagggttttcgttttcagttcgataaacgtcgccaccaccacgccgccaacgccagcaatgaacaactcaccgctaatgccgaccgacaagtaaacgcgcttcttcttcagttcggcgctgttatataccatcattgacacgttgccttcgtcgtcaatgcgagcggaataaaggttgttttcctggatattaacagcacggcttgaggtgcatttaattttgattgactttgccattttatttcctttctcccatttcgatatagaggtttaccagatccagaaagtcggatttgtttctgcaactcaatttaaagccaacgtgcgattctatcttattttgcatctcggataaggttgctccgccgttattcatctttagaacttcgcggcatacgtcagccagttttttagatatcatatttcaccaccgtaaatttagtgtttttgcaagcgccttcgatatcgctaattaggcgattcactctgatattaatcatcgttttgtggtgcatgacgtcaataatgccgacaaccgttaacaccatgattgaaaagataagagcaccaggcccatgcatagaaaatagtgcggtcattactgcgatcgtgaatttcattctggttttctccgttgcgtttcgatggaataactatacccgcaattaagctggtacgtttagcaattcgtgctattcattaaagttcgcctggaacactgcgcgagcgaatccgcgcggagtaatagagcgaagcatctttgttctttcagacttgcctcccaggaatttccacgcccaaaagaaatcgacgccttccacaccttccggcggtaataaccgtttcggctccacgaatccgttaccgtgccagatgcacgttttcttcgtgtaattgtcgcagtgcggcattttggggtgccaaacttcctcatgcggagcaacatacccgccgaagtcgcgagggtggaaataaaaatccggcttgcgccaaagcgtagacaatttgccaaccgggttttctaccatccaggggcaattatattgttcgcccaattgctcgatcatcttcgcatcatcggctgctgatagaacatcctgagtctgtcgggcgtgcttcaccccgctatgcgctaacagcgtgcaggaagggaaagcgaaaataatgtcaggatccgggatgcccaggattgtgcgattcacgtcgaaatctttgtcaatccagatgttgacatactgtatattggggtgaaccattcgaatgctgtattcgccgtggtctcctgagtcagcattgaaacagtacaccttgcatcccttgatggcccacggcaggcccatgatgccggagccgtcgaacatgcagtaaataaccttgtctttcatgctttccacgcctcaatgaacatactgttagattccagcgtcagcgtaacgccaggcagggaggactgaacaaggcgaccgcccggaacagtcccgatgatgtaacggcccttcgacttcgtgatcgtgatctgagtgaagccggaggcgcgattcatgcggagaacgacgcggccatgcgcgttcagggcggcgagaattgaatcagtcttcggatggttcattgtgtagctccttcgttttgttggtgtttggatagtatgccactatccagccatgttgttttagcaaaacgtgctatttaatcacaaacactttctccgtggagtttttgtttccgcctgacttgccgtttgctgataaagagcttttggcgttaatttcaaggatgcactcaaaatcatctggcgcggtatactcgctcacaaaaacccggcaccttttagaaattttcctgacccaatcccaaaacgcaacatggtcaaagtcaaccccgtagccagtcgttccctggtatggtggatcgcagtaaacggtcgcatgatctggtatttcaagatcggaatagctcacgctggaaaactcaacgcccctcaataaccttgcctgattaattattgagcgcaaggcttctttttggtaatttctttccccggctcttgtctggcatattccagcataaccaccaaaccactttccggaatatgaacaaccgattccagcccaaccaatcatttcatcacttccgttaaggttttttagctccgcatattcatgccgtgaaatttctggcggaatccatccattaacaacggccttaaacattgctattacatacttgtttgcgtcatttgcaattctgcgatcggccttgacgcaatcgatcatattcatgccaccagcgaaaggttcaacgtatacgcttccaatctgacccatcgcatccagaattctttttttgaatcttgctttactccccatgtacttcattattttacctccggaacgcaggtcgtgtaatcctggttaatgtagatcgtgcgctgaatgcgaggttcaggatcgctgaggctttggatggtaacatcgttgctgccgacgcggcacggaacagatccgaaaataaactcgccagtctgcttgtcgttgatttgccaggttctcccatccgcctgtttaatgacaacgaacggcgtgttgtccgcattgaattcgttagggtgacgaccgtaatagtgcatgatagcagcttcggcagcgtcgtgaaatttgttcgtcacgtcattggtcgccttttcgcgtccggccttgatacgttcttccggcgatccgatgatgtaggaaaagctgttcgaaatggtaactgttcgcattatattttaacctcgttttggtggatgaagtcggcgacgtaatggcattcgatcggattctcgatacccgcgagcacctcgcacgacccgttattcagtagctggcaatgctggcattccgcaccgccaacgctggcaatgacaatggcgatcccgttgcatgaaccgccaaacattctgtgcgggaaggggtaagcctcgcaggtgcaaaccacctccccggccctccgctttctcatgcgctacccttctcgatgcagaatacccaatcgcgagcatcaaccgcaaagcgcgccacgccgtcgagcacgatgaaaacggtatgcccgttaacgccgcgacccttctcgatatcggtgacggtgcggaacaggtcgcttgcgccatattgaattttgtccccgattacgacgtcgccaaatgctttcatggttgctctcctgattggtttcgatgtggtaatgataccaggcctcgcggcccggcgtttagcaatttgtgcttatttgatgccctgagcaattttatccattttgcggaaccaaatagccagttcttcgagcatatcgaacaggtcagcttttttgctttccatgatggcatcacagatcaggttgatatcgcaagccatgactccgaggtattcaccgtaagcgtgtacacctgcaatgttagaagacttgctatcacggcggcatttctgcgctttataaatcagactcatgatattggaagtttcttttgtcataatatgtacgttgctcatgatgtttgcctctttgtctgcttcgtttcgatgaatagataatagcaaaagcccacgcggggcttttaacaaaaagtgctatttacaccaggcggaaccgaacttcatcaccgtaaatcacggcctgaatgtgatcgccaaatgtgatggttgcgcgagtggtttcgtactccgtgtggccgtatcgccatatcccgcgctggggataatgcgccgcgctttcgtgccaaatgttcatagtgaaatcgccagactccccgaactccaggcactggccgaccatcgctttgacggcctggtagtcatgccagcgttgagtagcacgatcggtaacgcgctccacacgattgcgctctttgtgctccgccgcagcctcaaccacggcccacttactacgggtaaagattctcattgctggtactcctttttgatttgggcgcggaaccgcgaagcatctttttctgcccgttcagcgctgtgatatcgtttcagaaacagagtatcaatccccatgcaaagcgtttcgtcggcgctgtatttccccacaagccaaagactgaccgtctgcctgtctaggccgtagttcttatcgaagtgaacgcgcacattcgcaggcacatagccatgcgtcgaaatgaaggcgtcaacgcgatcgaatagctcttgcttgttcatgattattcctcaacggtgaatttaatcggctccttcccggtcgccttgcgatgggagttgaccagcgtttcgaacttgccgatgcactcgcgcaaatcagtgaacgtgctggcgctccccatgacacgccatgattcgacgttctgcccacgaacatagttgatgacgtgcttcatgattttgtgctggccgccatcctttttggtgtacacgtgcataactgcgatcctggttgatttgtaggcgaatgctttggtgatgtatttgcaagtttgcatcgtgttcgctcctgactggttgatgtaatgactatacccgatcccgccagcatggttttgattatttgtgctattcctccgattgtcgattattccatccattcggaatagtggaataggctgtgattgcatctgattacatggtgattacttttgacgattcatgattgattgtgattgtttcattctgtgcaatgtgatgatggagtgtttcatgatgtgcaacgaattgcatagatgcatgcactatgcacataattcgccgttcgaatcctgccaaaacgtcgaacgtgtttcccaaacatttgcgtcgtgtgggaatgtgtgggaggaaaaatcttacctgaaaattgcacaaaaagtgaccaatataagcctataatagatatataagtatatgataaataacaatattattattattactccctctctatctatatatgtttggtaagatttctcccggcatggctaccggaatcatcttgcgagagccataaattttagatgttccgccgccgcctggtggtataggtatatatgggggatgcttactaatcttaccaaacacgctcaaaccctttgacagcaaggcttgcgtggggtaatctcgccttaccaaacacaaacaaacgccgcaaatgtgggggagaaacatgcaatacaaaggttatgaattcgaagaagtcgatgtgtccgagtggatgcagtacgacgcagaaaagcaggccgcgtaccatgaatggctgcaatcgatcacgttcggtgagccggaaggcaatcaccaggctggccgggccattgaaggcgcgttcacaggcaaccgctcgaaggagatccggcgcatgttcctggatggcgggcgacgtatccagatgacagcagatcagttcacggaaaaattcggcgtgcatcccgtcgataaccacttccgccgaccactgctaaaactccttgagcctggcgaggtcttgcgcgtgagcctgggggccgggttaatcatcgtgtccactgagttcgatgatagcgcgggacgtgacctggaggccgatgcttacaggcagcagggcgttcacgctgaacgggaaagggttttatcgatcgttgacgaagtgatgccgaaaggcttgctttacaacggttacacaatggcgctgaaagccaaaatcacggtggggcaatcatgacgccacacccagaccaggaagaaccgaaatagcactttttgttaaaacccggtcaggacgatcgggtattatctttccatcgacaacgaaccgatgtgatgaggagcaaggcaatgaaaaaagaatttggcgtaagttatttcgattcaaaaggtattaaacactggttggtttttgcaaatcgttttggttttaccaaaagcaaggccgagttcttccgcgaaagccttattaaaaaaggtaattttattggtgctgaattaactgttgaaatgctttaatcaacccgccacttcggtggcgcataaccggatataataccatgaaaaacattaccagcaaatcacaaactgccgggcgaattgtaggtgaaacattacttgatgtttccagcagaacagacattgtttattcagatgatactggagtattggagtacacaagcattaatgggtgttttgtcaaggttactgcgccgccagataaagtaataagattcagatgtagcaacgggcgtatatacatgagaattatagacagagataaaacccatttgtacgcaggaataattattgacatcaataaaaactacaatgaatttatatggtaaaaataaacagcatagcgccgctccggtggcgccatattcccaccaccagcacggcacgcgccaggaggattgaccatgccacactttaacagaacgcttcaactccgcaccttcgccggataccagatcccgaaggagtcgacgaaggcagttccaggccgtaaattcggcgtgtacttccactggcagggcaaatggcgctttaccgtcattcgcggcttttacgtcacctgcgacggcgttgacattgacgaccacagcggcgggaatcaggttcacaacttcaaatagcactttttgttaaaacacgatcggggtggcttgctatagtaaccccatcgaaacgaacaacggagcaccacaatgaaatctcgcgaatacctcaacacccttaatggcctgatctactggctggaagatgacgcagtgatgatgcgcaagcgcgaaggcacgatctcgaagaagtcgaacatgacggctaaaatcttcttctctatggtcggcaacgatacgctgattctggttgagccggagccggagcaaaagagcatgaccatgaacgaattcactaacttcctggctggcatcgacaaaagcgccacgactgcaaccgcgcaggtcgccatccagggcggggccacccacattgccatcgacggtaacggcgacgtctttgcattcaagatgcgaccgcgccactgcctgccgaaagatgatgacgcaaaggattacctgggcgaatggcttcgcgggtcggagcagtacggccacattgcgcgaacagtctgcttcctgggcaacactggccgcgagcatcgcaactggcgggaactctgcttccagatcccacagcaatagcactttttggtaaacgcccggtcaacggatcgggcataattatcccacaccaacaacggagatttaccatgaaacacttcatcaaaaacgcggtcgtggctatcgtcggcaccaactttgagggcaagaagtcacgcattcacctgctgcatgttggcaatgacggcaaaatgcgcggggcgttctactacggcgagcgcggcgaaatcctgtacgattcgaaattcctttcccgccttgtgcgcttccagcctggaaaggagttcatggagtggtcgcctgaatacctctgcgaaggtctggtggtagaatcgttcgttgccgatccggttaagctgacctctcgcgactataagcgcatggcccgcaaggcgcacaaactcatgaagcgcacgccgaaaagccacgtatggcacatcttcgccaaccaactgtaaggccaggtgtgatggaaaccgtaatcgtaatttgcacgcatgcgagctacgcgccgatggcccccttcttcaccgtcggcaaggagtataacgccaggttcggccctggcctggatgaagtctggattttgcaggacgacgaatccaccacggaggacggcgaattctggctggcgtgccgcatgccggatgagaagatcgcgatgtaccacaatcgaccatatgaaaacaacgttttatttgaggtgaaactatgagcaagaaaatgattgcactgtattggcttcttttcttgggtggcctggtggttgccaaagaagatggctggcaaatgatcggaatgatgatggtcatcattggggtaagccgcctatctgagattaacggcttccgccgtggtcgccgggcagcattcactggcgacaaagaatagcactttttgttaaacctgccgtaacgtcatttggtaaagtggcgttactgaagcgaaacaaaccaatcaggagttacaccatgaatgaccacatcatcgacctgttaagcgtgctggctgaggataccgtagccatcatcgagcttgaggacggcaccgaacttcagatcgaggttcccagcgtgcgattctgcgtatccggcggcgagcattccgagcgctccaccgaaacggatcttgactacgcgacccacttactctgcctgaacgcgatcgaggagatccgctaatgaacacaatcaaactgaaatgcgtgtccgtcgagtcgctcgttagcatttcctgtaagcctggcgatatcatcaccgccagccgtgataacgattcctcatgctggcacttcgacggatactacctggatgatgatctggtggttcgcggcatcttcggtgagttcgcacggttcgaagtggcgaagcgcaagaccgatcgcaaactggtggttcgcgcaatgtgcatcatcgcccgccagtatgggtggactgacgcaggcgtgaagcgcgtcggcaactacaaaacggtcaaggagtgggcgcgggattgggccgctttctacaccgacgaaaaaggcgagcttcagcacgatatcagcgactacctggaagattgcagccgtggcgatgccgtccgcgagttcatgcaggcagaaatcgacgccctatagcacgaattgctaaaaccgccgtcaggggatggtgcatactatccccacacaaaccaaagaggaaaaatcatgagcacctacaaattcattctgaccccgaacgctgattctcctgctggcgtgggcgcgaaattcaccaaaggcaagcgctatgaggccgagcctttcaccaaatacaccggggattcactgtataaaatcaccgacgacgaaggcaacatgtacgcggtcaaccctcgcaactcgcactacatcggcggcggtcagttcagcattgagttgcaaatcaacaactgtttcgctggcggcgaactatccttcggcgggttagtgagcggcgcgatgcaatatcccatccacacttcggcgtcaatgttcggcggcatcacctccactgagtcgcccctgttctttgccgacctgaaggcccacgaacgcgataaagatcgggatctggaagcccttgccgagcgcgtgctgaacatgttcgggcgtgatgagtcgcggggcgttgcacgtggatttaagatcggcgctgagaaatccgctcacttcaaagagggcgtgaagtcggcaagcgatgcggttgcagccctgggcatgctgtcacggtcggttatcgtcggaagcgcgaaagaagcctcgctcgctgaccgggttaaagagcttgagtcagagcttaacgccgcccacaaaacgatcgagaaaatccgcgaagccatgcgcacgccggaaggtgaagacgcgcagacccatgcgaaagttctccgccagatggctgacgccctggttagtttgtggcgcgacggcaaatagcactttttgctaaaacttccgcaaggccatttgatatagtggccttattgaagcgaaccaatcaggagctaaacaaatgagcattccgtatccgaccaaagacaaatcattcctgggcctggctgttgttgaaattatcaacccggacgtgaccaactccccggatgagcctacacttgcacagtgggcaggattcaaagcaggtgatcgactgaccgtcgaatgctatagcgacggcgagaagtgggcgcaggtagggcgagactaccacacagaagaattcggccaggtgcttcctaccgactggttcaaacttaacgaaggcgaatataaggtaatcgaagaatgaacaacaaaatttgggtgctgacctacactatcgggactaacgaggggcgcaaatcgcgccgcctcacctgcgacacgaaagcgcaggctgaaatgcagcagcgcgtgctgggcggcgaggtggtcgaatacatccgccagccggaatccttccaggtcaattggcctgagaagatggacgttgacgccgtgctgcatgaaatgcgccatgtgcaaaacgacccggcggcgtggaaagacttgtacctttgcggcgacgctgagtcagtccgggatcccttccattttgtccggcgggcgcacgcggaatggtcggatcgccagttcggcaacgttggcccgattggcccactgaaacacctggcaaaagaggcaaacgaagccgctgaagcgccggatgacattagcgagttcgccgatatcatcatgttggtgtgggacgcaacacgccgcgccggaatcaccgatgagcagttggcaatagcggtggctgaaaagctggagcggaacaagcgccgccagtggggagccgttaaagatggcgagccgtgccaccacttgaaaaattaacgaattcgtataccatttaaagcgcctgtaagcgattctggcgggcgcaaattttactaaggtgattctatgtctgagttctcaaaagtcgaagatatgccgattggcgcaacggtaacgggtatccagatgagtgagtcggtcgatacgattactccgctggcctttccggttacacaggtcgaaaccgacagcaagaaaggtttcatctttatctacaaaaatttcaacgcccctctgcgtgtcgagatcttcattgctcgcggaacctgggtcgaatgggagaaggcttaaatgttcggactgaatgaggcgcagtacaacgctgtgaagcgcgtggcaaaacgaatgacggcggaaaccaaagacgccatacggaaagacaaaaagacttacgatcaggttgccgccaggatgatcgataagcattgggccgaagtcaacacgctgttaactcgcggtcagtttatctggctggctggttatctcgaaggccgtttcggtcgccgtgatggcgagtatgaataaaaaataagcgaacgaatcaaccgcctattgacgcattcactctgaccgggtatcgttaaaagcgtagacacaagaggcggtaaacatccgcaagtcgcgccccgctttggggcttttatcgaggggtgatgatgcagtacaaggtcatactcacagcaaggaaaatgggcggcttttgcaagtcctgcattcaagagttcagcatgacgattgaagcgaacgataccgccgacgcggtggagaaagcaaagcagcgttcaggcgtcaacctggacactcataagataagcatcaactacgtaagggaagcaacacaatgataactctgattgtcgcgttaattatgctggtcataggcttctatgcaggcactttccaccttgtcgaacggctgtccaagcgcgtgcatgaaggcactttcgccgcgatgctgtacaacaagaaaacgaaacgctgggaaaaaattggcgatccgggcggtatcgcgaaacgaatagagttttcgccgctcccgtatgttgactgtgagccttttgcatcacttcagaaagtgctgaagcggcgtaacaaactgatatgaacataacccgcttcggcgggtttttttgtgcctgcaatctggtatactcgcaactcaacacagaaggaggattaacaatgtctgaagaacgcaaaaaacgcgtaacgaaatcgcacttcgaaggcaatttcaaggcgctgtacgaaaaagattttggcgtagtgctggggcgaaccgccgaaatgacgccgcaacaattctttgaaatcgcgaagggctatttccagtgggccgaagaaaacgccatcaaggctgcggaaaccgccacttttcagggcgacgttaacgagtggggcgtgaacaagccgcgcattttcacgatcacagggttaagcctattttgcggagtgaaccagtcaacgcttgtacgctaccgccacgacccgaactatgccccggtcatggagtttatcgactctgtaatctatgagcagaaattccagcttgctgccgtcggcatgattaacgcttcgttcgtcggtaaggaaatggggatcgataagcccgctgttctcaacattgacgccgtggctggcaacaagaacgagatcaccgatgaagtattggagaaggctgttagtaacattctggacaagatttaagggccgatcatgaatgacgaaatgattatttgggaagacctgaagccagcagataagctggcaatcaaggcattgagcacgcgcaacttttcgctatttctgaagatctggtttcagattatccagggcgaaaagctgatgtggaactggcatcactcctacttttgccacacggttgatgaaatcatcgccggaaagcgcaaaagcacgatcgtaaacgttgcgccgggttcgacgaaaaccgaagcgttttctatccacctcgcgccgtatgcgtatctcaagtgccggaaggttcgcaaccttcagatctcgcagggtgatgcgctttcaaaaggcaactccgaccgcgtaatcaagatcttttcatcgggcgaatggcaggagctatggccctcgaaattcgggcggaagcagatcgatgaattccaggttcttgacgacaacgatcgcgtaaggctggaaatggtgtcccgttcgtctggtggtcagatcgtcggtaagcgtggcgggtacatgacgccgggtttcagcggcctaatcgcgctggatgatatcgacaagcctgatgatatgttctcaaaggtgaagcgcgaaaagagccacatcttgctgaagaacaccattcgatcccgtcgtgcgaagaagaaacaaggcgacgaaacgccgatcctgtccgtacagcagcggctgcatgcacaggattccacctggttcatgatgagcggcgggatggctatcgacttcgatcgcattgttattccggcgatggtaacgagggaatacggcgaatcgctccctgactggttgcgtcctgagttcgaacgcgacgtgttatccgggccgtcggtggtcattgatggcgtcgaatactggtcattttgggaggacaacgaatcgatcgagaacctggttgccttgcgcgatgccgatctttatacgttcctttcgcagtatcagcaggagcctatcgcattgggcggcaacgtgtttaagtcggaatggtggcgctattacggcgacagcgaaaaggctcatgagccgcgcccggacaagttcgagtacaccttcattacggcggataccgcgcagaagacgaacgaactaaacgactattccgtgctgtgctattggggcaagtaccgcgatcgcgtctacttcattgatggaatccgtggcaagtgggaagcgccggatttgcgcgtgcatgctgaggcattcattaagcagtgctggcgaagaaacaaggaatgcgggaatctgcgaaagatttacatcgaagacaaggcgagcggtacgggtctaatccaggatctgaccaaagcagttaatggtatgggtgagatcgtcccggttcagcgcgacaaagataaggttactcgcgcgatggatgcgcagccaattatcaagggtggccgcgtcgtgctgccggacagccatccgttcattgcggagcttgtggcggaaatgagcgcatttacctatgacgattcacatccccacgatgacatttgcgacaacgtatttgacgccgcgaacctggaaatgaacctgagcgatgacccggtagagcgaatgaaacgccttgcaggattgaaaaagctgggccgctaatacataatgtgggcttaacggcccacaaatcacacaaggttaaaatatgaaagctatcaagatggatgattacaatcagatcttcaatggtggcgcggggtacgcgtcaaccacggcgatgattgcaagcacgttcgggaatatgtcgcaagtcgaggagttctatcacaataacggactggcgaaaaagattgttgacgtgatcccggaagaaatggtgtcgcccggcttccagcttaacggcgtctccgataatacgaaattccagtcagagtgggacggccttaaacttgagccgcaaatcactgatgccctctgctgggcgcgtctgtatggtggctcttacgtcctggcgatggtaaacgatggccgcatgctgacttcagcagcgaagcgcggtaagccgctggaatcaattgtcgtttacgactacgattcggtgtccgtagcggaggaggagaagaacccgcgaagcccacgattcggcaagcctaaaatgtacaccgtcaagccgctaaacggcggaagcgactttaacgtgcattatacccgcatgcactacatcgacggcgagcgtgtaaccaacaaggtgcggaaactcaacaagggcgctggcggaacggtgctgaacaagtcgatgattgaagcgattcttgattacgattattcagagtacctcgcaacgcagttgctgaagcgtaagcagcagggcgtatggaaggccaaaggtcttgctctaatctgcgacgacagggagggcgaatacgctgcccggttgcgcatggcccaggttgatgcgaattccggcgtgggtaacacgatcggcattgatgctgacgacgaagaatacaccgtgattaactctgatatttcaggcatcccggaattcttgtccgccaaaatggatcggattgtcgcgctgtcaggtattcatgagatcgtgctgaagaacaaaaacacaggtggcgttagcgccagccaaaacactgcgttgcagacgttttataagctggttgagcggaagcgcaacgacgactacaaaccgctgttagaattcctgctacaattcatcgtcactgaggaagacttcagcgtagagttcgaaccgctgtcactgccgaccgattcagagaaggctgatatctttaagaaaaacgccgaagcagtacaaggactggttacggatcaggtcattgacgcgaacgaagcgcgcgataccctatccgcgatggttcccgaactgaaactgaagggcaacgcgccggaacagaagcagctaccggatcgcacgccagggtcaggcaagaccaaaacgcaaagcacgcagatcctgaacaacaccgaggagggcggcgatgaaagttaacggcagaattccaaactggcgttatcctgaagcaagcgagcgggatttatcccgcttgatgcaggacgcgacaaccgatctggtcgtggaaatgcgggaacggttagaccgcctgaagttcgacgccacggcggaggaaataaacgaggcggaagacgatatcaacgaggcggcgattgcgttctttgccaccgtcattgcggcgctggcctccattggcctgacaatctaccgtttcaactctaagcagtggctggttattgcgctggcggctggcgggcgagataatgaagcggtcatgatgctgaaggaattcggtgctggtggttatgagcagtggtatcagcaggcgctgaagaaatggcaggataccgcaaaggcatcaatccagaagttaacagccgatatcgtcgctgactggacaacgaaagttcgaaccgccaacaacattggcaagactcgcgagcagatcgatgaaataatcgagggccgatacgccatttatggcagttggtcgcgcaaccgggcgagcggcatcatcggaagttttaacagtatgttgatgatgcagcgactaaaagatgctaaagtatcgcattacttttggttcggcatgatggacgaccgcgaacgcgaaagccacatcaaactcgaaggtaagcgacgccgcgtaaacggtgacggcatttttcccggcgaggagtacggttgccgttgctgggcggttcccgattttaataacgtagaggaattacaatgaaaagagttcaaagattcgacacggtaaaggtgaaggcccgctttgatgagaacggctttctggtcgataccccgatcgttgcgcgtatcggcgcacagacctaccagacccctaacggccagcgcgttgagtttcgcccgcgctccgaagtgttcgacgccgaatcgctggcgtcataccagggtaagccaattactttgggtcacaagatggtcaacgccaaaaacgcgaaagggctggtggtcggatcctgttccggtgctggcaaagaggacgggatcggggttctggttccggtgatgatttacgatggggagtcgatcgagcaggcgaaaaagcgcgtagcggctgaattgtccgttgggtacacctcgatcgatatcgacaaaaaaggctggggcaacaacgcgactggcgaatactacttcgatgaagacctaccggaaaacttcgaagaactgaaaaatgattccgtctctgattgggttcgctttgatgccgtgcaaacgaagattcgcgttaaccatgtggcgcttgtttttcgcgggcgtgcaggaattgcgaaattaaatcttgatagtgagcaagaatttccctatgatgacgactcaaaccacaaaggagctaaaacgatgattatcaaaattgacggcgtagacgtcgaagtagccgataacgtaggcgcacatatcgctaaactggacgcgcagatcgcaaccgcaaccagtcaggtaacgagcatcaccgcagagcgcgacgcacttcaaaccaaagttgatggcattgaagatgaagtggcagcacgcgttgccaaaatcaaagccgacgaagacgcgaagcagaaagttgtcgcgatcgtctccgccgctggcatcaagtgcgacggcctggacgttaaagcgatgaaagttgcttacatcaaagaagcggatggccgcgacttgtcagataaagaagattcgtatatcgacgcttcttttgactttatctccaattctgataagatggcaagcaatcgctctaaagtcttcgccaaaaaagaagatggtgagcaggaagacaagaaaggcgcgccgaaactcgatggttctaacatcatcgacccgcaagccaaattccgtaactaataccgtgcggccttcgggccgctacaaaatccaaatcaaggagatttaatcatggcaattcctgcaacctatacccgcaagcgcgatatttgcattccgggccagatcgcggatacttcgctgtacaacatcgacggcacctgtgccgctgaaaatgacattttaactggcgttctggtcgcgttgtccggtggcgttgttgatggtcataaagtggtcgataccgctaaaactgctgatgctgttctggtgggcgtaaccactcattcccattaccaatcgccggaattcaaatacgaccagttttcggcagtaaacgttatgacgcatggccgcgtgtggtgtcgcgctgcatctaccgtaaccgcagcagattgcgcgtttaagtcgctggtaactttcggcgctgatggcaccgtggcaaaaggcgatgctggcctaatcaaaaccgggtacactcacactggcgagtggttcaaaaacaaagatggcgatatcctggtgaaaatccagctaacgcaggacgcaaccgcgccagccgctcccgccactggtggggcgtaaaaaataggggcttcggcccctttttcatgcgttaaaaaaacctttgaccgtttagcaattcgtgctattcttcatctcgttaagtcaaaacacacaaacaggagtttcacatgactatgaaattagatgcattcgagcagaatgcaatcaaggttgcaatgcagggtatgggcatcgacgctaacaaactcgacgcgcacggtatctggactgtcaatcagcttacccaactcttaaatcgccagtacgaacaggcttacccgcaaactggtgtgctggagcttttcccggttactaccgaacttagtccggtaactaaaaactttgaatggctggagtttgacggcgtaacctctgcgaaaatcatcgcggattataccgacgacctgccgaccgttgaagcgatggcgtccgagaaaactggtaaagtgttccgcctgggtaacgcgtggtttatctccatcgacgaaatcaaagctggtcaggcgctgggttccagcctgagcgaccgcaaagcgtctcttgcacgcgaaggccatgaaaccctggttaacgatctggtgttcaaaggttccgcgccgcataacatcgttagcgtattcgaccagccgaacattaaccgcctgacctccgcaagctggactacgccggaaatcgcattcagcgagttgcaggatctgatcgatacgatcgaagatgtaacgctgggtcgtcaccatgttaccaacatcgtgatcccgccgtccaagcgccgcctgctgacgcagaaaatgccggacgttacggagagttacctttcgtggttcaaagagaactacccgaatgtcaccatcaccgcgattgcggaactggaagatatcgacggcgcgggtactaaaggcgtgctggcatacgaaaaagatccgatgaatatgtcgatcgagatcccggaacgcttcaacatgctgccgatgcagccgaaagacctgcatttcaaagtgccttgcacctccaaatgcactggacttatcgtgtatcgtccgctgaccatggccattctttctggcgtgtaattaaaatggcccttcggggccattttttattgttgcgaaaaacctttcattgtgtttaaatcaaacctcaccaaaacaggagagatataaaatggctaaaaaagatactgctaccatcgaaccggaaatcaacgaaaagccggaaacctcacagccggaaaccgcaaagccggatatggtaacaatggaaaacgtgggcgcttgcctgattaagttcgacggcaagaaagtgctaccgggcgaaaccttcgagatcgaagagtctcaagttgaccgcttccgccacgatatcttcaaaggccgcgtagaattccacgatgatattcgccgcactcgcgactacatcgcagcagtgaaagcgaaagcaaaaaccatcgtgcagcctacgagcgccgaataaaaaaccaacaagggcgctacggcgtcctttttcatatctggagaaagaccatgaattacacgattcaagatgtgatcgacaaaatgcgcagcctcgcgccgccgcttaaagaagtaccggaagaactgttaaccgcatgggtggtgctggctgaggaattcgtatgcgagtctaagttcggagattcgatcattacagcgctggcgctgatgaccatgcacctgatgtttctggacggcgcaatgaagcaggaaggcgagagcgtggaatcatactcgcagcgtgtagcgtcattcaccctgaccggggagttttcccaaacgttcgatcacgtgtcttcggctagtgataacgaaatgctatcaactccgtggggtaaaatgtactggcgcatgctgaaaatgcgcggcggcggcttcggccttatgaccgctggcggtcttcatcgttgcggcattggaggttaaacgccatgaactacaaagcaattcaggcccgcgcgagtgcgggcattaagtttttcagcgatgccgatggcgtattcaacaagtacaccaaaggcgctggcggcggcatcgaccccgaaaccggggaggatatcatccctggcgaggttgtgaccacaatcaaaggtgcggtgcgggatatcaaagatcgcgatatcaacggcgaaactatcctcgctggcgacaagcgcggcttcttcactcacgacgtaccaatcatggaaggtgacgaaatcgacgttgacggcgagcgttaccgcgtagtgaatgcccgcccggtgaaacctaccggaaccgttgttgcctaccgccctgttttgcgaagggtggcgacttatggctaactacaccatccgggagttcactggtgctattgatgcatggtgcaaggcggctggggacgcgctggaggacgttgtacgcatgacgtgcgaggatatcctaaaggatcttgtgatgcgttctccggtcgatacaggccgcttccgtggcaactggcaaatcacttttaaccgcgcgccgctttacgcaatcaacgcatacgaccagaccggggcgaagactatccagaacggtaacgcgaacattgcactgttcacaaagggagccgggattacttcgatctggttcagtaacatgctaatctatgcgaacgcgctcgaatacggacactcaaagcaagcgccgaatggcgttatgggagttgtcgcaattagattgggcgtttatgtgacagaggcaatcaaacgagcgagggcgaaaaatgcactatgatattgcgttaaaatgtaaggcagcagcggccaaatttgccgccgataacggaatgaagatcgcgagcgataacgttgactttaagccgccagccaacggcgggacgcaccttaaattttcctacatcgaagcagattcccgatctgttagcctttccagggagtgtcgcgtttaccttgggctagttcagatcgatgttatctttaaaccgggcatcggcaccgacacggcaaggctaatcgcgcaaaatgttgcaaaatactttcccgaaggtaaaatcttgggcgacaaagaaatgaatctttatgtaagcgagtgggccgaggttcacggcgtgcagaaggcgcaaaccgggtggttcttccccgttcgctttacggtgagatgtgaacaaatggaggcgagcgggtatgcacttacctaacgggagtaaaatttttattgaggccagcaacgagagggagtacgattttaagtggcttgatacaactgatgttggaatcccgaacacttttgtgttcgtattgagtcaggcggctggagtaggcgcttttcgcgttggcgatatcgtcgtaatttccgaatgcgacaacaagctgatcgaaggaaatgtatactcgatccgatctgttaatggcgatgtttcgcgagttagggtatggcctgagtatagggcgaatgagttgcccgttggcagttacatttcagcgcctggaaaggctcgccgcattttatcctggactgaacttccttgcgtgcagtcaatcgacaaggaaggaaacgagcaaaactggtatacttaccagtgccttgacagcggaagggaggagcggcagaagacgacaaaatcagcgctgtttatgtcttatgtaatggctcacgatccgggaaatccggcgtatgatatcatgaaagcacatgagcgcgataagtcagtaatggctatgtacatgcacatcccgagagcgagcgaaaaccgctattggtctggaggcgtctcgtttgatgatgtgcctagcacggcggtaaacgaaatggagacggtgacgttacgaatggcgattcgtggtgcttataatttcttgccagcatagaaatataaaggcataatggcggtgttaaactttcatcaaaacaggagtattcaacatgcatttaccaaacggtgcaaaggtcttctttgagaaggcgcgcggtgcggaggttccgtttaccgcaatgaccaacgacgcgaaaaacccaaaaatcacggcggcagatggtgcgctcgacgttaacgatatcgtaatctttaccgattgcacatggagcgactttgtaaataaagtggcccgcgtcaagtcggtatcggctggtgtagcaactctggaagagttcgatacctccgacactaacaaataccctacggctgcaaccggaagcgtgagcgttgtcactgactggatcgagttgccttgtattcaggatttgggcaaagacggcaacgagcagcagtattataactaccagtgcctgagcgacgagcgcgaacagtccgagcctacctataagtcggcggtgacgcttaactacacttttgcgcacgagtacaataacgcaatctacccggtgttgcgtgcagccgacgccagcaaagaggcgaaagcgatgtacatgtacgtcccgcgagcgtccgaggttcgctattggtctggaactgcatcattcgatgacattccgactactgctgtcaacgagatggagacggtaacgcttgatgttgcgctcaagggtgcgcacgtcttccttccggtggtcgcataatttactggcggggcttgtgcctcgcctttttttatgcataatagcattcaatacataccaatcaggagattacaaaatggctaagtttaaaattcgtattggcggcgaacttccatccttcaaacttccggtaactttcacttgccccgatggcaaagatgcaaccatcaatatgacggtaaaacatcactccaccgatgaaatgaaggagttttatgaaagcgaagaaaaagcgccgaaaggcaatgtggattttatccgcttcatggccgaaggctgggatctggacgaagaatttacggatgaaaacatttcctggctgtgctcgcattacccttcctttgtcatggcattgcctcaaacctacatggccgcgcttgccgggcatcgtgcaaaagtctaaggcgggctgtttatctgacacttcagcccgagttaaccgatcgccagcttgctgagtatggtttacggcgatcggattacgaggctgatttagaggaaattttcttcgatgagcagaccgcccaaagttggcaactattccaggccatgcaaacgcaatggcgcattgggatgaatggcccaacggggctggactataatacattgcctatgttctttgaattgtataaaatcgacaatcgagaagcggcattgcttgacttgcagatcctggagggtgaatacctcaaacagatctacaaaaaatcacaataagcgcctacgggcgcttttttcatatgggggctaacatggctgataaagtagctggcttgacgttcggcgttgacgtgtcgcaggttgacagagcggtgcgatcacttgccgaactgaagaaccaaagccaacaaaccggggcgggtcttcagtcgctggcggacgctgagaagcgagcgacggcacagactgaggaaatgaaccgcgcgttgcagaaccaaaagaaaaccacggaaaaggccaaaaccaatttcaacaacatcgcgagcgctatcgatcccacgatctcgaaaatggctaacttgcgcaaggcttcggaagaactggataaggcctggcaattgggccttgtgccggacaaggaatttttccgcctgggtgctgtcattgagtctaccaccaacaagctgagacagcagcagttggcgctaaccgaagaaggccgcgcagcaattgcagaggcagaggcgaaggagaaagcaacgaatgctggtcgtgattttgtcgccagcttgaagcagcaagcagaatcagcaggcaaaacacgcgccgaactgctggaaatgaaggcggcgcaattgggcgtgtcggcagaagcggcaccgttcattaatgccctgaagcagcaagagcaggcgttaaagaaacagcagagcgcgatgggcctcgctggcatttctgccgggcagtatcaagcggcaatgcgccagcttccagcgcagattactgacgttgttacgtccctcgcttcaggaatgccaatctggatggtggcaattcagcagggcgggcaaatcaaggatagctttggcggcatcggtaatacatttcaggcgctgaaaaatctaatctttggcactagcgctgatattaatgaatctctggacgaaaccagcgaaagcgcaagcgatcttgctgagagctttaataataccaccgaggctggcgagaagatggggggccttattaggttcattaaccccgtaaccatcggcgcggttgctcttggggttgctatcgcagcaattgcaaaggctggtttcgatgcgtggaagtcacaaagggatctggcgaatgcgctggtgctgactggtgggtatgctgccactaccacagggcagattaacgatcttgctaatgaactgagcgagacttcgagcgcaacttcagggagaatccaggatatcgcgtcaactttggcctcttctggaaaatacaccattggccagattaagaccatcacgaagactacggcggaatgggaagcgcagacgggagagagcagcgataagatcaagggctactttgaccagatcttaaaagatccggttaaggggcttgctgatcttaacgataagtttaacttcctgaatgaaggccagctaacctacatcgaatctttgcgtaaaaccaaaggcgagacggcagcagcagatgcggcgacaaaactgtttgctgacacgatggacaagcgactgaaagatgtagctgatagcgcaacacctcttgaaaaaatgtggatggatatcaagaagtggtcttctgacgcatgggattgggttggaaatcacactgtcggggcgctaaaccttatcgttgatacggtttccgcgatcatcaacacgatcaggaagttgattgccgacggcgacgctatgatcgcgcagtttatcgttgacgctggccgacaactacagaaaattcccggcatgggagactttgggaatgactttctggcgcagcaggagcagttaatcaaggactcgaaagccaaatctgccgagcttgcaaaaaccatcgcggagcagcaggcaaggattgctaaaggcgaaatgggttacattgacgccgccaacaacaaagatgtttccagcggctacagtagtgaaactaagaatcgcgttaaccaggaagaaaaggatatcctgaaaaaccgcaacgccaggaagcagcaggcagatgctggcgtaaaaattgatgagcagtatcaggctgaactgctatcgctccaggcgcagttaaaggttttgcagcagcacaaagggcttgatgacaagatcagccagcagcgcaaagactacttcgagacggttgctaaattccaggttttggaagaggcaagccagaagcgaaaactgacccaaagcgaacagcagatgctggcgaacaaaaagaatatcctgtacatggcggaacaaaaggccatcgtgggagatcagattgttcagcagcagcgacttaacgccttgcttgacaagtcgaccaagtatcaaaaccagatggcggagaaaaccaaagcgctacaggataccgccggaatgggtagcaaggagcaggagagataccgggccaatgcgcagatggcggctgactggaaaaacagcggcggatctttaagtgaccctggatttaaagccatgcaggatgcaagcaataaattctacgcacagcaagatgcgcaaatgatgaactggaaggccgggtttactcacgcgtgggctgacattggcgacgaagttaatgacgtatacaccaacatcggggatattactaaaaacgcatttaacggcatggcgagcgtgctgactgattttgttatgactggtaaggccagctttagcgactttgcaaagagcgtgatcactgacattaccaacatgcttatcaagatggcgctgtttaactcgctttctgccgcgtttggtggtggtggcggcacgttcagcttcgccaacatgttcagtaagggattttccggcggtggttacactggcgacggcgggaagtatgagccaaaaggcgttgttcacggcggtgaattcgtgttcacgaaggaggcgacgcaaaggttaggcccggaaaacctgtaccgactaatgcgcggctatgcaagtggcggcctggttggcggcaacgcaagttccggatctggaatcaccaacggcggcaacgtcgcggcgtcggcggctatggtgtttaccattggtgatattaacatcacgatgggttccggtcaggatagcaaggggttagagcagggcgtaaggcagatcgtgaacgatatgttcaccgaggctttgagccaaaacgggcgcattgcgaagttcgtcaatgagaaaacgaggaggtagtagtggattcctttaaatggtgtacacaaattcaaggaggggcggcaaaggtcgccgtctccaacaacgttcgttcgatcagctttggaaatggctacatccaaacggcgtcgagtggcattaacacaaagcgccggacggtttcgatcgtttatggtgggtcggattgggcggcggtttatgacttctgccaggagcacgtaaccaagccgtttgtatggacggctccggatggaagggcaggcgtatttatcgtaactgccgattccgttaaccttgcgccgcaaggcggagggatgtttgaggtcacggcggaattcgccgaacgcttcacttcagccggataatcaaaaagcgccctttacgggtgcttttttttggcctatgatctggagtcaactagaggagggcttacgatgacagccaatgtttcaaaagagtttgcgaactgcttacaaaaacttttccccggcgagatcctaacgctgatcgatatcgacgccacaaagttcggcgggcaggtctaccgattccataacgagaacgtcgcctatacaaccgaggagcttttagcggctgtgaacggcgggacgcttcagcccaagatgatcacgtttcgcggcgagcaatatggcccgcgcccgttcggcctgggcgggatcgcaatgtcgagtgatggcacggtggaaaagccgacgctgactgttagcaatattgatgcgcaagcgagtgctcttattcgctcctacaacggcctcatgcaagccaaagttacggtatgggttttggtcaaggaattgctacaaagcgacggcagcgttaaagagggcgattttaggcgatttgtttactacatcgagcgacctaaacaggttgacccgcagaaggctacgtttgaactaacgtccgtcttcgatatggatggcttgatgattccggcccgcctgactcaaaccgtttgttattgggcgcaacgcggctggtacaaaaccgggaagggatgcagttacaacgggcaaaacggatactttgacaaatacgggaataaggttgatgatcccagccaagatgtttgcggtggccttgtttcgtcgtgccgattacggttcggcaatgaggctttggattttggcggttgcgctactgcaaccttgaaaagcggacggtaatatgttaactccaaaaatcaaaatgcagatcatgcagcatgcgaaggaagtttacccgcatgagtgcgcagggctggtaacgcagaaatcacgcgtgcagaaatatcaccgactcgataacgtttcgccggatcctgagaacgaatcaatgccggacgaaacacagtacgcgctggcgtcactggaaggcgagccgatcgccttcgttcactcccacactggcgacggggcaaccaccgttccgagcgccacagatttatgcttctgtgatgaatctggcttgtcgtgggttatcgtgtcgattccagaaggtgatatgcggattatcgaaccgaagcgcaggccgctgattggtcgcccttgggctttgggcgcttatgattgctatggcctggtgatggattttcacaagcgacacggcgtcacgctgaaagatcgccgcctgccgttcgaatggtggaagccggaatacaaagaggatctttaccgcgactactggcgcgaagatggattcatcgaaaacactggcgatcccgaagtcggcgatatgatcatcttccagcttcaggcggacaagtggaaccacgctgggatttacgttggaaacaataacatccttcaccacgccttcggcaagctatcccgccgcgatatctattccgggtggtatgagcagcacaaggttttaatttgcagacataaggatcttaaacatggcatcacatacaaagacgattaaactttccggctccctggggcgtcggttcggtgtcttccataacctcgcagtcgattcagtcggcgaatgcatccgggcgctatcctaccaggtggaagggtttaaagccttcatgcaaagcaaggttggttctaacatgcgctttggtatcgtcgcggacggaaaaccaatcagcacgaatgactttgcaacgttcgccgtagcgaaggagatccgaatcatccccatcccgaaggccagaaagaacggcggattgttgcagatcgttatcggcgctgcgattatggttgcggccttcttcactggcggtgcatcgctggcggcaatgggggcgttttcatcggcggcgtttatggctggcggcgcaatggtcttgggtggcgttatgcagatgattgcaccgcagatgggaggcaatatgcgagcgagcgagtcgccagaaaataaaccgtcgtatgctttcggtgggccgattaacaccacggcggcgggttatccaatccagttgccatacggttacagattggctggcggtgcgctgttcggttcgggatcttacgcagaagacaacaactaattaagcgattcgctttttagcctgggggcatagcctccgggctttttgtcgtgtacaattgcaaaactattaacaggaggctaaacgatgactaatatcaaggcccgcaagggcggttccagccagccgcgaaccccggtagaaatgcctgataacctgatctcgaaagacaagatcaagttattgctggccgtttctgacggtgaagtagtggatgacttcagcctgaagcagttgcatttcggcggcgttccggttcagaacgaagacgggagctataactatgagggagttattgcagaatttcgccccggtacgcaaacgcagagttacatccagggcttcagtgaatcaagcgctgaattccaggttgcacgcgacgttacctttaacacgccgtacacgctgacggtatcgaacaagaatctttctgctatccgcttacgcctgctatggccccgcgtgctgacgcaaaaagataacggcgatatggtcggttctgtcgttgagtacaagatcgaaatggcggttgacggtgcgagctatcaaacctacttgaccgacaaaatcgacggtaaaaacacgactggcggttacgatcgcagcatccgcgtcaacttgccgcaagacttcacttcgcaggttcttatccgcgtaagccgaattacgccggacgctgacggggtgaaggtggtcgatgccttccaggttcagtcctacgctgaggtgatcgatgcaaaattccgctatccgctgacggcaatgctttacgtcgagtttgatagcgatctgttccagaaccagatcccgacaatctcgctcaagaagaagtggaagattatccaggttccgagtaactacgaccctgttaacaggacgtatgccggaacgtgggacggaactttcaaatgggcatggagcaacaacccggcctgggttctttacgacctgatcatgaatcagcgttatgggttagaccaacgcgagctagggatcccggtcgacaagtggtcgctctatgaggtttcgcaatactgtgatgagcttgtgccggacaatcgcggcgggatggaaccgcgttacctgatggatatggtcgtgcagtcgcaggtcgaagccttccagttggtaagggatgtttgttccgccttccgtggaatgacgttctacaacggggaaagcctttcgattatcgtcgataagccacgcgatccggtttacctgttcactgctgataacgtcgttgatggcgtattcgtgcgaacttttccgagcgaaaaaacgatgtacacgtcgtgcaacgtgatgttcgatgacgaagagaaccagtacgaacaggatgttgaaccagttttcaacccggatgcagccatgcggttcggtcacaacccgacaagcatcacggcgatcggttgcaccagacggacagaagcaaaccgccgtgggcgctggattctgcaaacgaacctaagcgcaaccaccgtttcgttttctactggcctggaaggaatgattccgtcatgcggcgatgtaatttacgttgcagatccgcattggcaatcggcctttaacctggttttgtcaggtcgcattatggaagtaacgggaacgcaggttttcctggctttccggtgcgacgcgaaggctggcgacactctgatcctgaacactgacgacggtaagccattacgccgaaccattgccagcgtatcagcagacggaaaaaccctgacgctaaacgtgggatataacttcgacgttgcgccggacagcgtattcctgatcgaaagtgaccaactggcggctgaacagtacgttgttaccaggattgagaaggggagcgatgacgacgaatttacttttgccatcacagctacccaatacaacccgaacaagtacgacgcgatcgacaacggcgtaatcactgacgaccgcccaacgtcggttgttgaccctgattcaatgggagcgccggaaaacgtgtcgattagttcattctcacgcattgttcaggggatgagcgtcgagacgatggtaatcggctggtctgccgtgcagtatgcaaaactttacgaggtgcaatggcgtaaggatggcggcaactggaacaacgtgccgcgcacagcgacaacgcaggttgatattgaggggatttatgctggcgaataccaggcgcgcgtaaggtgcattagcggcggcaatatcgcgtctccgtggtctgctttggctagtgcatcgctgaccgggaaaatcggagcgccgaaagggccaattaaccttttcgcgtcggataatgaaatctttgggattcgcgttaagtgggccatgcctgaaggggcagaggatacggcatacattgagctttaccagtcgcaaagcggaaccgatcaggatgcaagcctgcttactctgattccttatccggcggctgaatactggcactcaattttgcccgctggctatgtgaactggtacaaggcgcgaagcgtcgacaggatcggcaacgtttcaccctggactgattacgctcgcgggatggcatcgactgacgttagcatcatcacggatcagatcctggatgaaattctggatagcgacgccatgaaggaattgcaggagagcgcacaggacagcgcgtctaaactcaacgactacgcgaacagcatcattcagaacgcgttagccaacgatgcagacgtcagagttatgcgcaaggagaacggcaagcggaaggcggaaatctcgcataccactgtgctgatcgccaacgagactgaagcgcgagcggctgagatcacacagcttaaaacgcagattgatgaagatatcacgtcgcagattacgatcctgaacgaagcgctggcagatgaaagcgaaacgcgagcaacccaaattaaccagttgcaaacacaatttggggaggatatggaagcagggtttacgcaggttaacgaggcgatcgcaaacgaaagtgaagcgcgcgcaacgtccgaggcggcgttagatgccaaaatcggcgagaactccgcagcgctggcgcaaaagctggattcgtgggccaatgttgatggcgtcggttccatgtacacaatgaagttagggctaacgtacaacggacaggaatacaattcagggatggcgttacagcttaccgcacaaggaaacaacgttgtttcgcaagtgctgtttattgccgatagatttgctattatccgcaatgctgcatccggcgcttacacgcttccgtttgttgtgcagaatgatcaggtgttcatgaataacgcgcttattcaggatggttcgatcactaacgccaagatcggacagtatatccagtccaacaacttcatttcgggccagcaggggtggagcatcaacaaatccggtgcgtctgaattcaataacgttgtcgttcgcggtgcgctgtttgctgcgtctggtaacttcggatttgatggcggaaacggtgtggtaatcaacggtaacggcgtcaccgtcaaccttgacggcggtgggcgaattgttttagggaggttctaatatggcaagcggtttacttatcgatctcaatgatggtaatccggcgatgcaaatcacggcgggcatgcgttgcccgtctttttgcaacctggttgctaacgcgtgggatgagaaagtggttaacgtggatggctatgtgccaggggcgcagattatcgtcatccctcgcgatcccgtatccatccagaacagagggacaaaccttgttccaactatcgggatgcaaagcggctactcgcagaacggatcccagcttacgttttctacgtggtggtcagataattgggggcgtgaccgcctctatgatttgacaatctgccagatcctgccgacggccagcggccaggggttatacattgccgattccaccgactttaccgcaatccccgactcaacgcgggccgggttttgcgtgtgggccggaacgattacgtttacagggcaatggcgaactccagataccggatacgaccgcaataagtatatggtgtttgctcgctggagcgccgacggcgtgacggtcgaatatgacggaaataacatctacgccaggaatgaaacgaacggcgaggagggcgacgctacggttacaatgagggtggcgattttcgccagcggagttgcgccacaggcgggaaccggattgaattttttcaacgcggcgggccaatgcacattctcaacggttcgccgtccgtttatcttcaggaaccgattctataacccgtcgtgggattatcaggatatcggcgcgggaatgattttgcttggcaggtatggattcagaagtcgggtcagtggtgatcggtgtagggcaaaatttgccgggttaatgatgagcggtaacagcgtaagatgtgccagcggcatcacaaaatctaactggacgtcaagatatagcgtcgtccaggatcgattagtcggcatgagcgttcccattattgaaaacatgtattaaaagaaaaggggccaatcggcccctttgttacatctctaacttttcttcaatggctgatagccgcgcttcgatacccctcgcaatgaacaagtttaattggtcatatctgaaactgtaacgatccccggcctcctttttacccatgattggattaacgtcgtcctcatagccaataatgatctcttcctcttcccattcgtcatggcaaatgaatccgtagtgcataggatccagtccgcaagattccatgatctcgatggcgcgctgaacggtcaggccgatgtgctcgcgagcattttcgccttcttcagcctgtttagccagccatgagtaaatgccaatctcccgagataacagcttcgcggcggcgatctcgttatcggtaaacttacgaacttctgacttcaggcgagcatctgaggtctgaattgccccgttcgctgcgtacacagcagaaacacgcatagatgagttaccgatcgagtatgcattgtccgcccctgggtacataatgccagcgttgctaatgttccaacggtctaccctattggttgttccaactgccgtagttgagaacgtgatcccggcaccagttgccgttgctgagaatccctctgatggggcaaatcgaatgctggccttcaggccaacccaatcattaccatcatgcccaccaaacccgacatagaaagcatcgcctgactgtgacgacccgcgagaactgagcgacccattgcatgagttcgcgcgaattacggtgcttgaggtgctaccattgcgcggggtgattaagttcaactcatttgatgagttgttaatctgcttcaggccgcgaccattccaactaagcggctccgatgccccggaagaaatgccttccattttgtacgttcccataggaacatcatagccgatccacaaatcaccgttattgctggtggcaaacgtctgccgacgattatccatcgttgcattaagcggggtggttaacagcctgaaccagccgccgtggttagtcgccgaacaagtaccatcctgtaagaaatgctgagaaacgttggagtgttccgtatatgccgaaccatcccacggacgagaaccataaccaccgattaactgaccatttgagcttgcagcattgttagcgccgcgagtgtagttatggaatacagcagacccaccagacgtattttcaatgccgaaagagcattcagttgcgttatccccaacgaagttaaccccaatcccgttcgtggctgtcgtctccttcagaggcagcttctgcgtcgacgtaacatcaacaccgccgcgaaggttggatgcaccattgacgcggagcgtgcttaacatcgtaaccgcattgctgaaagtggcattcaacccggtaacggtaaagtttgccgcatcaaaaacaacctgcttcgcgctgttcatatcgccattcgggcggaagtacatgccttgacctttttccgggatggagtaaacgatcgcgttgttgttattggcccgaactacggcaccgttcagggttagcgtagcgttaccaccagggacggagatcgcttgcggctggctgaacgtgttagctacgttggtgcgggcaaccgtattatcattagccatcaaatagtcagatggtgaattatatacaattccagcaggctccgtggtaatccaggtgtaaccagcgcgatcgataatcggcccggtaatcaatccattattagactgaacgttcaaacggtttaaccacataacgggaaagtaaccgttaggcgagagcaaataaacatcaaaagatccgtcggtgtttttcacaacccccagcttcaaacgtgacgtgctatttgatgccggaatgagtgcgcattgagtaaagttggcgtcaatattattactggttagcgtatcaggaagaccacggccagaaatagaaaagatatcgatcgggagattcgccgagccgaagttagcgccgccaccaataataaattgcgcaaaacagtttgactgtccagcgttcttaacgttggcaatcttcatccacgcccgcgagctacctggcgaggttggcagcttatcaggagcctgaacgccagccacaagatcgacagtctggttataaagatcttgagtctgatcccttgccgacccggcttgttgccgtgctgttagcgccgcgttctccgaagccttggagttcgtttctgaagttttcgcagcgtccttggatgcagccgccgccgctgcgtttgtcgccgatgcttccgcgtccgacctaacctgatcggccaattcctgcaaagcattgagatcgaaatctttaaagaattctaacgcttcagcaataacagtttcttgcgattgatagtaacgcagcgtttcagcaacatcttgcgccaggccgtcaacggtcagcgaatcgcttaaaaggatcgcgtaatcgctggacgggacaaccgcgccgtttgtggtgatggcgttaatttgcgtatcactgacaaccttgttaatcaccgccatctgaatcggcgacgataaaaacatgattgttgagcctgggcgaatgagcgataaggctgattgccacttcgtgccagtcccggtgataacgccgtttgcgtccatcgcggctttaccttgtctgtatagtgccattttaagacctcttttggttggttgagtaacgcagataatagcatcaatgaagcaataaaaaaaggagccttacggcccctttagttgtcaaatcagaacgggatatcatcatcgaaatccatgccctgattaccaccaccgctttgcggcttcggttgttgttgcggcttcggttgctgaggctggccccagccaccctgctgattaccgccgccctgcgttggttcgcgctggctgaattcaagttgcggcataatcatttcattgtggctgtaagtcgcgccgttgtgctcgcggtttacgatctgaagtgtccggcaggtgacgctaataaccttgtccacctgcaacgcttcatcgtaccacgcaatcatgctttccttcgcgaagaagacggcgcgatagttggtgtatacagtttcgtcctggccgtcgcgattgcggatcttcattcgctccgacaggtcgaccgcatacattttccacggcccgttattgttgctgccctctttgacgtaaggcgcttttcggattacccctgttacaacatgcattgtttttcctatggggcggtttcccgcccggttaaattagttgaaagatgagatatcttgtgcttcaggttcaggctttgattctacctgttccggctcacgtttcgcaacctcttgcggctttccggggttaaatccgttcgctggagtcacttttagttgcgcctggcgcttcgtgatatcgtcttccgtaaccttccattccgcaggcgtcaacgtctgtttagccagcttgtaaatctcgcggagagattcgaggtcttcgcacgcatcaatgcgttttttgaagtcttgcggcttcatcttcgcgatctctgcgtcatcgtcggcctgcttgatgcccagcgcggcggctaacgcataacggcgagcgtatgaggttgtcgagccatatgcttgctcaacggttttgctgatcggcatgttgaactgaaacgccatccactcgccagattcgtgcagaaacatagtctcaaggtgcataaccttgtcggtgctggtatccatcattgattgaatgaccataattttgttcttttccagcgatggcccgatggcgtcaaggatatctccgagattggcgtaggtgttccccaggtggctattcttcccgcttttcttcgcggcgacgaatccagacttcgctttgattaacgcaactgcgatctctttgaaactttcagatgtacgcatgacaaactttccttttcctgattggtggagcgcactatatcacaagtgcgccgtagtgtttagctatttgtgccgtatacttccgggaacatgtatttcacgaattgcggcgtgggcaacttcacttccgctgcgttcgattcgtatgacggccaaacgtcatgcttgacgcattcggcgtactggtgaatcacgctttgatactgcttccgcccgatctcaatctgctgatccgttaacgtgaacgcgagaggcgcgaacggtgattttttctcctgcgtcagcaggcggacaacaaccgggcgtttttcgttgtacgtcttaacgaacagatcgcgctgcaatgccattttgagatagtagcccaagttgaacgccagccgtccgaagtcatccggtttagaggtctgagtagttttgtagtcggtaatcaccaccacttcgaaaacttcatccgggttaaacccccactctttgatgagttcgggatccgacacgacgtcaacatgatcgagccgaacctttaccgggacgccgaaaatttcgccgaagattgacaactcgcgttgcgctgtatccgattcaatgcacgccgcgtgccgtgggttagccagcatcacgtttcgcatttgcacgaccgcatcgaaatcagaatccttgaccagcttccggcctgagttgatggcggcgctttcgtcgcagagttcgatcgcccaccacacgttaacatcaatcccggcgcggtatgccatttccagcaattcggggtagtccttgttggacgtcccaatcaggccacacgctttcaatttcgcagacaatgccgacttcgaagtaatcagatccttaacatctcccggcgcggtcgctcgcaggtactcgccattaaattttgacgtctcaagcatgcaggtatgggagcaagtaccgaatgaaagcgcggctgtttcttctcgctccttgtatttccagtgagccggggaggttgcgtaaatctcgccgaggcttgagccgctaacgtatctcgcgcaccaggagttaggatcgtggtaatcatcgttggataattccgcgttggtgtatgccttaaaaattgcttcagccattggtatcactccgtttgtggtttcgttgcgttaagtatacgcatcacgattccaggtgcaaggcaaaaagtgctattcgccaactggtcaaaaaatgagcgaaatttaagtaagattaggtaagatgcatcttacgt

SEQ ID NO: 20 - DNA, 299 bp, Unknown
  source: /note="Description of Unknown: KP3W-S0102 Bacteriophage sequence"
tttaagtaagattaggtaagatgcatcttacgtaaatttcgctcattttttaaccaatatcgcaccatagaatatatataagtatatgatatctaactatattattattattactctatctctatctatctgtgtaggtaagattttcttcgggtatatgtattttgctttgcgattccgctccgatttttctgtgaatatttacctataggcatcttaccatcttaccgatttgctttaactacatgaaatatataaagaaaatcacgtaagatgcatcttacctaatcttacttaaa

SEQ ID NO: 21 - DNA, 40344 bp, Unknown
  source: /note="Description of Unknown: KP2W-P0101 Bacteriophage sequence"
atctgttatcctcctaaagtaaaccctaaagccatcacctaaagccaccacctaaagaccagacctaaagccaacctaaagccaccacctaaagaccagacctaaagccatcacctaaagagtgccgctatcttaaagacaaccagaccgatagacccattgttaacctgtagtgatgccttgtagttatctgtagtcatttcataaaccctcactaaagggaataagggatacttaaagagggaataagggatttaataaaaagatttaatttaatggttgactttaagtaacccttaaggctattattcatcacgtcaacgggacaacggccttaaagccactccctgagatactggagtcaaccggataagtagacagcctgataagtcatacgaaaaacaggcattgacaacatgaagtaacatgcagtaagatgtaccacataacgttaaccaccgctctggtgtcttctaggtgacttaagcgcaccacggcacataaagcgaaacaaaaatggttgacaacatgaagtaaacacggtacgatgtaccacatgaaagacaccgagtgtcgtaggtgtaaaaacgcgacatagtggatagatggcgaaagcacaagcgaccacgataataaagagcttgtcgcacttataacgcaagtgacggctaacactgaaatagcctcggctcaacgaaactgtagcctaaagttctttaacaatctggataatagctcttgagtgtaccgatgtataagcgaataactcaaggtcgcactgaaagcgtggcctttatgatattcacttaacacgaactaacatgaggtaacaccaaatgattttcactaaagagcctgctaacgtcttctatgtactggtgtcagcattccgttctaaccttgatgatgaggtgaacatgagtcgccaccgccacatggtgagcgaattacgtgccgcaccgggtatctacggcgagcttgagtctaccgatttgaccgggtgctatcgtgagagtatcgcactggctccaaccgaggaaaagaccatgcgtgtactctgcaagaacaaagagcaggcactacaggtagctcgcttagcttgcaatgagtatgagcaagattgcgtactggtatacaaatcacagactcacacagcgggattggtgtacgctaaaggtatcgacgggtataaggctgaacgcctgccgggtagcttccaagaggttcctaaaggcgcaccactgaaagggtgctttacgattgacgagttcggccgccgctggcaagtacagtaagtgatagactcaaggtcatgcacgatgcgtggcctttatgattatcactttttgactatgaaggaatcacaccatgcgcttaaataaagacacagcggtagctatgcggtcagcaatcgaatcaagagccgcacacaacgtgggagggattgctgatgttgcacgggtttataaggagaaagggcttacattccgcagattcatgtgggactgttatcatgcagtgggctttaaagagactacaagaatcatcgcagagcacaacacggtgacagttatcggcgggcacataacagatatcaatgattcgcacatcgaaactatgctcaaggttgcactgaaagacatagcttattagtaattaactacaggtcgttagctcgtagcggcctgaatgataattactaaacaaacctgagaggatatgactatgaaacaatacgccatccttattcccggctggtgctactcaatgacctgctacgggtacaacgaaagggacgctcgtgccagattcagggatcaacaaggcttcggcaagcgtttacctaatggtacggctgtatgggaggttatgtaatgagtaagttactggcaacctctaaaatcaaaggccaatgcactgtaacgctgcgtgagtattaccacgggtcaatgggatgcacctatgttgtgcgatacggtaaacaggtcacgcactgggtaaaccttgttttggcacaagaggagtaccaagcctgtgtgatacaccaagcaacatgtgcaggctggaacgactgacaacagacttcaagtctatcaggtggtaaactcaaggtcgctccatgcgagtggcctttatgattaacattacgatagaggatgagagtatgggatacgaagacacgaagaacctgataattctctgtatagcaatacccgctgcaatcaactttgtgtacgaggtatggattaagaaatgattatcgcactaatcgcactggtctatctgtgcatcgctatgtactttatgcgagactttaagcgcggtctggcaatacacaaggcaacgctgagttactttaagtggggattcatcccacggtttacggttcgtgaacgtaacggacgctttaaggccaacaaggtgggagtattctacattgctacgcactaactcaaaacacgtaaagattgcactgtatgcgatggcttatggtgcatcgaaacgcaaggtcaaacgcatcttaacgagacaccgcaagatgaccgcacgacaggctgcaagcgctgtcaaatgggctgaatttactctttactcttcttacagataacaggacactgaacaatgactttcaccgaagcacaagccgcactcgaagctatccgcaacctgccgattgaccgcttggatgaacgccagcccatgctggtggctcttgcggctgctatcgtgaacgatgagactcaagacggcgaactgacgcaggccaaaggcaattggggcttggagtctatggactactggcagacactggctgagcgtatgcgtgatgttggatttgtacgcttgggtaacggtcactttagcgcagcatacgagcacgcattgttaccgggcaaggttatcaaggtaggctttaagaaagaggactcaggcgctgcctatgctgccttctgccgcatgaatcagggtcgtgagggtatccctacggtgtacgacattcagcgtcatacaggctgctacacggtggtcttggactatctgacaccgcttaacgattggtgctacggtgaaagcgataagattcgtcaccactttcaggccgcacgggaaatcattgaggaggattgcttcgataccgccgaagagtacccgataagtgacgggttcattgagacctgcaaggatatccgcaagttcttcctaggcattgcatcgttcgattgtcacagcggtaacatgatgaaagaccaaatgggccgattgattatcacagacccggtatcgttcagcgcagacaacaagttaaagccgggtgagtttcactgtgacccggatgaactaatcgctgagattgaggcgctgagggcgcaggaagcgattgaccgctgtaaggcacgcaaggcacgccgtgaccctaaaggagactttcaggcagcacgtaaagcccgtgccaaatggcgcagaaaggcctctaagcgtgctaaacgtgacgctaaggtaatcgctaagatgcgcatggatgacaacgagcaacgcagggccgagccgagggcgcgcatgttgtggggcgataagcactggcgtaacgcttgggtgcagcacatgaatgttgacttcgcacggctcgaactgttagcagccgcacagatggcacagatagaccacaaggctatcgtatggggcaagccgttacacatagacgcataccttgacaagagactgcaaggttgatagagtcttttcttacaggtcatcatgaggtggcctgaataggaacgatttatccatagtgaggcaagcaatgaacatcatcgaaactatcgaaaagaatgacttctctgaaatcgaactggctgctatcccgttcaacacgctggcagaccactacggcagcgcactggctcgtgaacaactggctttagagcacgagtcttatgagttaggtgagcgccgcttcctcaagatgctggagcgtcaagcgaaagctggtgagattgcagacaacgcagccgctaagccgttactcgctacgcttctccctaagttaaccgcacgcatcgttgagtggctcgaagagtacgcctctaagaaaggccgcaagcctagcgcatacgcgccgctccagttactcaagccggaagcctccgcgtttatcaccctgaaagttatccttgcatcactgaccagcacgaacatgacaaccattcaggccgctgctggtatgttggggaaggccattgaggatgaggcacgtttcgggcgtatccgtgacctcgaagcgaagcacttcaagaagcacgttgaggaacagcttaacaagcgccacgggcaagtctacaagaaagcctttatgcaggtggttgaggcagatatgattggtcgcgggctgctgggaggcgaggcgtggtctagctgggacaaggaaaccacgatgcacgtagggattcgactgattgaaatgctcattgagtccacgggtctggtggaattgcagcgccacaacgcaggtaacgcaggctctgaccatgaggcactgcaactggcccaagagtacgtcgatgtgttagcgaagcgtgcaggagcactggcgggtatctctccgatgttccagccgtgtgtcgtaccgccgaaaccttgggtggcaatcaccgggggcggctattgggctaacggtcgcagacctttggcactcgttcgcactcactctaagaagggactgatgcgctatgaggatgtttacatgccagaagtttacaaggcggtcaacatcgcacagaacaccgcatggaaaatcaacaagaaagttcttgcggttgtcaatgaaattgttaactggaagaattgcccggtagcagacattccatcactggagcgccaagagttaccgcctaagccggacgacattgacaccaacgaggcagcgctcaaggagtggaagaaagccgccgctggtatctaccgcttggacaaggcacgagtgtctcgccgtatcagcttagagttcatgctggagcaggccaacaagtttgcaaacaagaaagcaatctggttcccttacaacatggactggcgcggtcgtgtgtacgctgtgccgatgttcaacccgcaaggcaacgacatgacgaaaggtctgctgaccctcgctaaaggcaagccaatcggtgaggaagggttctactggctgaaaatccacggtgcgaactgtgcgggtgtcgataaggttcctttccctgagcgcatcgcgttcattgagaagcacgtagacgacattctggcttgcgctaaagacccaatcaataacacttggtgggccgagcaggattcacctttctgtttcctcgcgttctgcttcgagtatgcaggagttgcgcaccacggtcttagctacaattgctctctgccgctggcgttcgatgggtcttgctctggtatccagcacttctccgcgatgctacgcgatgaggtaggcggtcgtgcggttaaccttctgccaagcgaaaccgtgcaggacatttacggcatcgttgcacagaaagtaaacgagattctcaaacaggatgcaatcaacggcacgcctaacgagatgattaccgtgaccgacaaggacaccggggaaatctcagagaagctcaagctgggaacctcaacgctggcgcaacagtggctggcatatggtgtaacccgtagcgtaactaaacgttcggtcatgacgctggcttacggttccaaggagttcggctttcgtcaacaggtactggacgacaccattcagcctgcgattgacagcggtaagggcttgatgttcacccaacctaaccaagcggctggctatatggctaagctgatttgggacgcggtgagcgtgaccgtagtcgcagcggttgaggcgatgaactggctcaagtctgccgctaagctgctggctgctgaggtcaaggacaagaagaccaaggagattctgcgccaccgttgcgcggttcactggactacgcctgacggcttcccggtctggcaggaataccgcaagccactccagaagcgtcttgatatgattttcttagggcaattccgtctgcaaccgacgattaataccctcaaggattcaggcattgacgcacacaagcaggagtctggcatcgctcctaactttgttcactcacaggacggtagccacctacgcatgacagtcgtttatgctcacgagaagtatggcattgagtcctttgcgctcatccatgacagctttgggactattccggcagacgctggtaagctctttaaggctgtgcgtgaaacgatggttctcacctacgagaacaacgatgtgctggcagacttctatgaccagtttgcagaccagctacacgagacacaactggacaagatgcctccgcttccgaagaaagggaacctgaacctgcaagacattctcaagtctgactttgcctttgcataacaagcacttagcattaaccctcactaacgggagactacttaaggtctcccactttaagacactttaggtactaagagattaaatttatgattaacattaagactttccttaagaacatctttaagttaaaccgcttgacttccgttaagttctacgcttggatgcccggtagtgatgacctccgcaagactgaatttaagttaggcttaggccgtgcggtaaggtggtcacgaagttggaatgttactcaacggcctccgggatggtcatcttccagaccactgaggacaacgaaatgaaatccttctactacccgaaaggttcaacatgtggtcgtatcgaacgggcatacagttaaccctcactaacgggagagttaaacttaaggtcatcaccagcggtggcctttgtgattaactttcaatacacatcaacatgaggtaagatactatgcgtaccaactttgagaaatttaccaagcgcgattcagtggtcaacgagcatggcgaacagtggcaagagcgccgtgaccgcatgaagaaactccacaagcaacagcgcggtaactcacagaaacgggagtggaactaatgatgggacgtatctatagcggcaacctgaacgattacaaagatgcggtagagcgtctacaggaagaccatgacgtgaccgtgaaggtggagtcattcagttatgaaaacccagcgaagatgtgcaggtcatccggtgaggttctccgtgtgttcacacgctccgggcatctggtggcatccagaaccttcgagcacagcgacagcgatgtacaaatcaacgcgcagactgcacggctccgtaaggttcacagcgatttgaaacactggaagtaataaccctcactaaagggagaacgaaaggaggaaacattatgagaatttcatttgacttaatgagtccttcctttctctcatgggatacgggtcgtcacactggcggctctattcgaaacggctatagaagggttcgttatgaaggtaagtggttaaaccatcacatactcatttgggaacacttcaacggtgcagtcccggagggaatggaagtagaccacattgaccgtaacaaacttaacaacgcgcctagtaaccttagacttgtgacccgctctgagaacaacagaaatcggtcagtacaccggaacaacaagtcaggaatcaaaggtgtctactggcacaaacaccgacaagtttggtacggtcagtgtcgaagaggaaacaaaacatttatcaccgctggttgctccacgaaggaacaggcggcagaacttttagagaaactcaaagaggaaattaattatgatgattttcaaaaccgtcccgtataaggctgtgtcattcgtagagtctgccgttaagaaagcgctggagacctccggctacctaatggctgatatcaaatatgatggtgtgcgcggtaacattgtggttgacaacgtggctgaggccgcatggttgtctcgcgtatccaagttcatcccggcgctggaacacctgaacggtttcgataagcgctggcagcaactactgaacgatgaccgctgcatcttcccggatggcttcatgctggatggtgaactgatggtcaaaggcgtagacttcaacacggggtctggcctactgagaaccaagtggctcaagaagaacaacttcatgtttgaccgtggtggtgttgagccgctgaaaggttccaaagtagcctttgagttggacactaagcgcctgagcgtgcgcctgtatgcggtcatgccgattcacattgcggagtctggcgaggactacgatgtacagaacctgctgatgccgtatcatgtggaagccatgcgcgctcttctggttgaatacttcccggaaatcgagtggcttatcgctgagacctacgaggtctacgatatggattcgctgactgaactgtacgaagagaagcgtgccgaaggtcacgagggtctcattgtgaaagacccacaaggcatctacaagcgaggcaagaagtctggctggtggaagctcaagcctgagtgtgaagctgatggtatcattcagggtgtcaattggggaaccgaaggtttagccaacgagggcaaagtgattggctttagtgtgcttcttgagactggtcgtttagtagacgccaacaacatctctcgcgcactgatggacgagttcacagccaacgttaaagcccacggtgaagacttctacaacgggtgggcctgtcaggtcaactatatggaagagaccccggacggctccctgcgtcaccctagcttcgagaagttccgaggcactgaggacaaccctcaagagaaaatgtaaccaactcactggctcaccttaacgggtgggcctttcttcgttctagggaattaaccctcactaacaggagacacaccatgtggcttatcctattcgctatcgtcgcaacgcttggattaatggctgccgacgacaacatttggcctgattgttaaggagacaacatcatgcgtttacacttcaacacatcaaatggtatcttttcggttcgccgtgaagaccgctctacagcagtggcctctgagcgcaacgccaagctgccgctgattggttcggtcgtcccattgtcgccgcgtgttcacctactgatcactcgtggagagttcattaaggcgatgaacaaagagcgcccgcatctggaagccgtggtcacttactggcctcgcatccgtctgttcgttaagtggattaaggaggttctgtaatgctacaacatcattggaacaaaccagacttagaggctcgcttcccggttaactctgctgtgcgatactccggcgacttcctcaagcgcttcttaggcatgagcggagtggtcactggtcactcgaacacaggtcgcgttaaggttcgcttcggtaatcagcacgctgagtttcttcctgacaacctgattccgctgcctaaagctgacgttaagactccgaacgtggaagcaccgaaggcagaattcaagtctgacgtgacccacccgaaccattacatgctgttcgacaacgtggaagccattgaggttatcgcccggtcaatgaccgtcgaggcgttccgtgggtactgccttgggaatattttgaagtaccgcctgcgtgctggcaagaaatctgaactggcaactatggagaaagaccttaagaaagcggctttctatcaggaactgtttgataaacataaggggctgtgttatgacgcttcgtgaatgctgcgattggtgtgccgctaagtggaaccaagctattgaggatggtgataaggcggctgctgacgcttaccaacaattgtacgcgctgtgggagcggcgctttaaggaggctcaaagtggagcaacgtgaacagaaatacctcctgacgatagaaggcaacaccgagtcctttgaggttccggtattcgcccggtctctcgaagaggcaacgctacaggctgaacattatgaggacgctgggttcgtagtgactcgcatccgtccagaagtgaaagcctaattaccctcactaaagggaacaacccaatcattaaccacaaaggagaaacattatggctggtttcaagaagaaaatctacacctctggtcttggcactgctgagccttatgcttacctgagtaagccggattatggcaacgaagagcgtggcttcggcaaccctcgtggtatctataaggtagacctgactctttccaataaagacccgcgctgtcaggcaatggtcgatgaaatcgtgaagactcacgaagaggcttatgctgctgccgtggaagagttcgaggctaaccctccgcaggcacagcgtggtaagaaaccgctgaaaccttacgagggcgacatgccgttcttcgataacggtgacggtacgactaccttcaagttcaaatgctatgcgtctttccaagacaagaagaccaaagagaccaaacacatcaatctggtagtggtcgatagcaaaggtaagaagattcaggacgttccgattatcggtggtggctctaagctgaaagtgaaatactctctggtgccttacaaatggaacaccgctgtgggcgcaagcgtcaagctgcaacttgagtccgtgatgctggtcgaactggctaccttcggtggtggcggtgaagatgagtgggccgatgaagtcgaagacggtggttacactgcgagtgaatcccgtcagtcccgcgatgagcaggagtggcaggaagacgagcacgaagaaaccccggatgaggatgaggatttttaaatggaacttaaagagaaactaaaggcttacagcgaagtttctcataacgggtgctgggagtggcaacgctaccggatgccctgtggttacggtaggattagacacggaggccgaatggaactaacgcatcgtctatcctacctagcattcaacggggatatacctgagggtcttgttgttcgccataagtgtgacaacaaatgctgcgttaaccctgagcaccttacgctaggtactcaaaaggacaacgttaaggatgcaatagaccgtggtcaattcgtctacagggagaacccgaaaggcgcaaagcaccacatggctaaacttaatgagaaacaggttatggaggtttacaactcgacacagacccaaagcagcctagcagagacctatggtgtatctcgacaattaatcagcgcgattaagagaggtaaactatggcagcacgttacgcagcacgtggagttaaacgagtagggtcatatagaagcggcttagagcagaagaacatggagatgctggaacgtaagggaatcaagggacagtatgaaatgtggtctattccctatgttgtccctgcatcgaaccacaagtacacaccagacataatcctacccaacggaatcattattgagaccaagggtctatgggatagtgaagaccgtaagaaacacttactgattcgtgagcagatgcctgagttggacattcgtttggtattctcttcgagccgctctaagttatacaaagggtctccaaccagttacggtgagtgggccgaaaagcatggtattctatttgctgacaagctgattcctgtggagtggcttaaagaacctaagaaggagataccgtgggataaactaattgcaaagaaaggagttaagaaataatggctaaggtacaattcaaaacgcgcgcttctacggaagcaatctttgtgcactgtagtgcaaccaagccaagccagaacattggcgttcgtgagattcgtcagtggcacaaagagcagggctggttagacgtaggatatcacttcatcatcaagcgtgatggcactgtggaagcaggccgcgatgaactggctgtaggttcccacgttaaagattacaaccacaactccgtaggcgtatgcctcgttggtgggattgatgataaaggcaagttcgacgccaactttacacctgcgcaaatgcaagcgctgcgtagtctactggtcacgctgctggcgaagtatgagggttcagtccttcgtgctcaccatgacgttgcacccaaagcctgcccgtccttcgacttgaagcgctggtgggagaagaacgaactggttacatctgaccgagggtgatgccatgaggatgatttgtattcgctgtgataaaccgttgaagagtcgtgtaccgtcacgtcagtgtcagtgcaaagacccaatcaaggcggaggaacacaccgaggaataattaacactcactaaagggagacttaacggtttccctttgttctcgcaactgattaaggaatgtacaatggaacgagaagacgatagtatctttctgtttcatgctccatgtgaaaactgtgggtcttctgatggtaactctgtgtactctgacgggcatgaatggtgcttcgtgtgtgaacatcgagtacccgcaaacaaagagcgtgaagcaaagttatcaacgagaagacgcacaggaggcagtaagcctatgagctatgacgtatggaatttcggcgacagcaacggtcgatactctgacctgactgcccgtggcatctcgaaggagacatgccaaaaggctggctactggctggcgaaagtggacaaccgaatgtatcaggttgccgactaccgagaccagaatggctccatcgtgtcgcagaaggtgcgcgataaggacaagaactttaagaccaccggaagccacaagagcgatgcattgttcttgaagcacctctggtctggcggtaagaaaattgtggtcacggagggcgaaattgatgcgctcactgtgatggaactccaagactgtaagtacccggtcgtatcattgggtcacggtgcctctgctgctaagaagacatgcgccgctaactatgaatactttgaccagttcgagcagattatcttgatgttcgatatggatgatgcaggccgtaaggcagttgaagaggccgcacaggttctcccggctggcaaggttcgtgttgccgtgttaccgtgtaaggacgccaatgagtgtcacatcatgggtgaagacaaagcaatcttggagcagatctggaacgcgaacccttgggtgcctgacggtgttgtttccgcgttatcactcaaagaccgcgttaaggaagctatgacctccgagtacgctgtaggtttattatttgatggctgtcaaggcctgaacgatagaaccttgggtgcccgtggaggcgaagtcatcatggtcacttccggttcaggtatgggtaagtcaacgttcgttcgtcaacaggctctgacttggggcaagcgaatgggtaaacgtgttggcctagcgatgctggaggaatccgttgaggataccattcaggacatgatgggcttgaacaataaggttcgtctgcgtcagtctgatgaagtcaagaaggctatcgcggaggacggacgtttcgatgaatggtatgatgaactatttggagacgatacgttccacctttatgactcctttgcggaggccgaagctgacaggctgttagcaaagctggcctacatgcgaacaggcttagggtgtgatgttatagtgctagaccacatctcaatcgtcgtgtctgcctctgaggaatcggatgagcgtaagatgattgaccgcctcatgactaagctaaaagggttcgctaagtcaactggtgttgtgctcgtagtgatttgtcacttgaagaacccggagaaggggaaagcgcatgaagaaggacgcgctgtgtctattactgacctacgtggtagcggtgccttgcgtcagttatctgatactatcatcgccttggagcgtaaccagcaaggtgatatgcctaacttggtgttggttcgcctgcttaagtgtcgtttcactggcgacactggaattgctggatacatggagtacaacagagaaaccgggtggcttgaaccgtctagctacactggcgaagaaggagaaggagatactggctggactgaacaagacggacagtcagacttctaaaggatgcccgtgtgggcattccgattgcgatggaatcatgtaccactaattaaccctcactaacgggaacaacctcaaaccataggagacacaccatgtttaaattcattaacactttaggcaagctggtagtaaaactgtacttcatcgaagccaagaagctggacaagaaggccaaagctgattcacagcgagccattgagttggcgaaacagtcccgcgagaaatccgatgcggctgttagtggcatccacaagtcggcagcgattgcagccaaagcacagtccatgagcaaattctttgagtaaggatcgaacactatgagcaagtcaatcactcacgcaaacaccatccgtctgccagacaccgccgaccagttctcccgccgagtacacatcaatgtgcgcggcgagaaggtcacgatggtctaccgctggaaagaccacaagtctccgaaagcacacactcaacgaatgaccttggatgacaagcaggtcggtcgcttgatgggtgcccttactatggctgctgacaaggtggtcggtgataaccgtgagcgtctggtagagttcggcgctggtatgcaagagattatcgagaagtgataaactcaaggtcgcccaagggtggcctttatgattatcatttagcacgaaaccaaaggagggcattatgctcgtaagtgacattgaggccaacaacctcttagagaaagtcaccaagtttcactgtggcgttatctatgactaccgtgatggtgagtatcatagttatcgtccgggcgacttcggggcgtatctggatgcgctggaagccgaggtgaagcgaggtgggcttattgttttccataacggtcacaagtatgacgttccggctttagagaaactcgcaaagctgcaactcaatcgtgacttcaagttaccccgtgagaattgtattgacacattggtactctcgcgtttacttcatgcgaaccttaaagacacagacatggggcttcttcgttccgggaaactacccggtcgtcgcttcgggtctcacgctctggaggcatggggttatcgcttgggcgagatgaaaggtgaatacaaggacgacttcaaggctatgctggaagagcagggcgaagagtatgttgatggtgctgagtgggtttcgttcaacgagccgatgatggcgtataacgttcaagacgttgttgtcactgtcaagctcttagagaaattccttacagacctccactacttccctgctggtatggacttcacgaagtacgatgcggatttattctggcgtgaagctggcgagtctgtggatattgaacatcgtgcagcgtggctgttagcgaagcaggagcgtaacggcttcccgttcaacacacaggccattgaggaactttatgtagaactggcagcgaaacgcgccgaacttctgcgaaagttaaccgaaacgtttggctcgtggtatcaaccgaaaggtggtaaggaactcttcaagcacccacgtacaggcaagccactgccgagttatcctcgcgtggtctatccgaaacagggtagcgtgtacaagaagcctcgtaataaggcacagcgcgaaggtcttgaaccttgcgacttggacacgagggactacatggagggtgctccgtatactccggtagagttcgttacgttcaagccaagtagccgtgaccacattcagaagaaactacaggaggccggatgggttcctgagaagttcaccgagaagggtgcgcctgtggtggacgatgaggtcttggagcatgtacgagtagatgaccctgagaagcaggcgtgcattgacttgattaaagagtacctgatgattcagaagcgtatcggtcaggcggcagaaggagacaaagcgtggttacgttatgttcaagatgacggtaagattcatggagccgttaaccctaacggtgcagttactggtcgtgctactcatagtttcccaaaccttgcacaagtacccggcgttcgttctccttacggggagcagtgtcgtagcgcttttggtgctgaacatcatttggatgggattactggcaagccgtgggtgcaagcagggatagacgccagtggcttagagttgcgctgtctggcacacttcatggctcgattcgacaacggagagtatgcgaatgagattctcaacggtgacattcacaccaagaaccagaacgctgcggaactcccaacgcgagacaacgccaagaccttcatttacgggttcctttacggagccggagatgagaagattggtcagattgttggggcagggaaggagcgcgggaaggaactcaagaagaaattcttagagaacaccccggcgattgcagcgctacgagaagctatccaacaatctctcgttaagtcttccgcttggattggcggtgagcagaaagtacagtggaagcgccgttggattaaaggtctggatggtcgcaaggttcacgtcaggtctccacacgcagcgctcaacacattgttgcagtctgctggtgctctgatttgtaagctgtggattatcaagaccgaagagatgctcattgagaaaggcttgaagcatggctgggatggtgactttgcgcagatgggatggattcatgatgaagtccagattgcgtgccgaacagaagagatagccaaggtcgtcgtagaggtagctcaagaagctatgcgctgggttggtgaacattggaacttccgttgtcgcttagacacagaaggtaagattggcccgaactgggcggtttgtcactaaggagtatttatgggaggcgtggctacactaaggttccacaagatgccgaccgggtgtgtagtctgcgtttcacataagcgcaatcacgatggctacttccggtacagtatagggtcgtccagaaagggcgagaagaaatgctttatgtttcaccgctgggtttgggaacgacaccgtgggcctataccagaagggtatgagatagaccacttgtgtctcaaccgtgggtgctgcaacgtagaacacttacagtgcataccgaagcgtgaacacataatcaaaaccaacaaagagcgcagtctcgtaaaggagaaacattatggcaatgaccaaacactttaaagtaaccttcgacgttaccgctgtgattgacagtgaatccgagaagaatctgaacgagttgctggtagacctagctaagaaggccggggctggcgagaagctgaatccgttcaaacaagaactgcttattcaaggtctgacacacgggccggaaggtgctgctgcgttctgtatcaagcaaggtctccgtgagtttatccgcgatggtcacagtgagttaagctctaccgagcagaagctgatgagattctcacctgcaaccgtgcgcgaggtgttcaaatgagtgaatacctgaaagttctggcagctatcaaaggttgccctaagtcctttcagtcgaactatgtgcgaaacaatgcggctctcgtagctgaggccgcttctcgtggacacattagctgtttgactgtgggtggtcgaaatggtggagcatgggaggtcacagcctctggtgtgcgcttcctgaaacgaatgggaggttgcgtatgattatgcctaagagtgacaccgtaacgatgacccgtgatgcgtggaacgatgttagcgcgtatattgataagctggagaaagacctagagttcctgaatgcgcttaaggcgtgtggtgtggataattgggacggatactctgatgcagtcgaaatggtttacggggaggatgacgaatgagcctaatcacattgaaagacttcgtggagatgcgtgaaggtaagcctatggagaatggagtgctggtcatggatggtgactggttggtatatcagtcaatggctgctgccgaagttgagacggattggggagatgacatttggactcttgagtgtgaccacgccaaggcacggagcattctcgattctgcaatcgaatcgtaccgaacccgtaagaaggcttggagtgacgctatggttgttctggcgtataccgacgatgtgaactggcgtaaggtactggttgatgagacctataaggagaaccgtaaggcgacccgtaagcctgtgggctaccgtgacttcctgtcgaagttgtgggagcgcgatgagttcattcacatcaaagaggacatgctggaaggtgatgacgttatgggtatcattgggtctggtcacgaggtcttcggcttcaagaaagctgtgttggtctcctgtgataaggacttcaagactatcccggacgttgacttcctgtggtgtaccactggtaacatcttgacgcagaccaaagataccgctgattggtggcatctcttccagaccatcaagggtgatatgactgatggctactcagggattcccggctggggcgatacggcagaagccttcctgaatgacccgttcattgtggagcctgtagagtccgtgttgaagtctggtaagaacaaggggcagacagtaaccaagtgggtgaagcgtgctcctgatgcgactgagacgctgtgggactgcattaaatccattggtgccaaagctgggatgaccgagcaggaaatcatcaagcaaggccagatggctcgcattcttcgcttcgaggaatacaattacattgacaaggagatttacctatggacgccgcaaagctgattaccgtcgctgtgctggtaggtatgctggcgcgaggtctctggatgttcgctctcatagtccgagacgttaatcgagactccgagattaagtgataaactcaaggctctctgtattaaccctcactaaagggaagagggagcctttatgattattactttaagacttaaccttaagaggtgaaattatgttacaaccaattaatcatgttttaactcatcccgatgatattcctagtatgcctcgtgcagctaaagagtatctacaggtgcgcttcaatcaggcctatgtggtggagtccggggagtaccgtgcgctccgcgctgcgggttactctgagtctttcattgctggtgtgatgcatggtctgtaccttgcctctcgaacacttgatgagattgaggtgcgtaaagagcaactgagacaggagtaattatatgtgctggaaaccgaaggtgaaagtccctaagatggacactaaccagattcgcgctgctgaaccagcacctttgactgaacctccgaagtctgtggtatggggaggcgatgatgacgaggacaccagcgtgtcttcctctgaggtgccaacctcaccgagcagcggtaagagcagtctcaaggtaaagctggatgacagcgcagccaagaacaagagtaaatcctccattcgctcaaaggcgtttgggtaactgagtcatagtatagggagaaacatcatgggattcttcaagaaaatcaagaaggctgttaagaaagttgtgaaggaagttagcagaccagtcgagaaggcaggtaaggaagttggtaaggttgttggaggcgcgctgggtgcaggtaagcaggagattatccaacaagaggctccagcaccagtagtagctgcaccgccaccagcacagattgtagacgtacctgaacaggataaggctgagggcgaggatgaggcgcaaaccgagagcgcacgtaagaaggcacgcgctggcggtaagaaagcacttagcgtagctcgcagttccggcggtggaatcaatatctgaggaggactgaatggctgattcaaaacgtacaggattgggcgaagacggtgctaaagctacctatgaccgcctgacgaacgaccgtagagcctatgagactcgtgcggaaaactgtgcgcaatacaccattccgtccttgttcccgaaggagtccgataacgaatctaccgactacacgactccgtggcaggctgtaggtgcgcggggtcttaacaatctggcctctaagttaatgcttgcgttattcccgatgcagtcgtggatgaagctgaccattagcgaatatgaggcgaagcagcttgttggagaccctgatggactcgctaaggtggacgaaggtctgtctatggttgagcgtattatcatgaattatatcgaatccaacagctaccgtgtgacgctctttgagtgcctcaagcagttgatcgtggcaggtaatgcactgctttacttaccggaacccgaaggtagctacaatccgatgaagctgtaccgattgtcttcttatgttgtccaaagagacgcatacggcaatgtgttacagattgtcactcgtgaccagatagcctttggtgctctcccggaagacgttcggtctgcggtagagaaagctggtggtgagaagaagatggacgaaatggtcgatgtgtacacccatgtgtatctcgatgaagagtccggcgattacctcaagtacgaggaagtagaggacgttgagattgatggctccgatgccacctatcctactgacgctatgccctacattccggttcgcatggttcgcattgatggcgagtcttacggtcgctcctactgtgaagaatacttaggtgacttaaggtctcttgagaatctccaagaggctatagttaagatgagcatgattagtgcgaaggtcataggtctggtgaatcctgctggcattacgcagccccgtagattaaccaaagctcagactggtgacttcgttcccggtcgccgagaagacattgatttccttcaactggagaagcaagctgactttaccgtagcgaaagctgtgagtgaccagatagaagcacgcttatcgtatgcctttatgttgaactctgcggtacagcgcacaggtgaacgagtgaccgccgaagagattcgatacgttgcgtcagaactggaagatacgcttggtggcgtatattcgattctgtctcaagaactgcaattgcctctggttcgtgtgctcttgaagcaactccaagcaacctcgcagattcctgagctaccgaaagaagccgttgagcctactatcagcacaggtctggaagcaatcgggcgtggtcaagacctcgataagctggagcgctgtatctccgcttgggctgctctggctcctatgcagggagacccggacattaaccttgctgtcattaagctgcgcattgctaacgccattggtattgatacttctggtatcctactgacggacgagcagaagcaagcactgatgatgcaggatgcggcccaaacaggtatcgagaacgccgccgccactggtggggctggtgttggtgctctagcgacctcaagtccagaagctatgcagggtgcagcagcacaggctggcctagacgccacctaataaccctcactaaagggagacctcatctttgaaatgagcgatgactaaaggttggagtcctttggtttccctttatctttaacaacttaggagatttaacaatggctgaatctaatgcagacgtttatgcgtccttcggtgtgaacaacgcggtaatgaccggaagtacacctactgaacacgaacagaatatgctgagtctcgatgttgctgcccgtgatggcgatgatgcaatcatacttagcgaggaacctagttcttatgacgatgacccttatgcggctggtgaagacccattcgctgatggtgaagacgatgagggccgcattcaggttcgtatcagtgaagatggtaacgaagctgagttcgacactggtagcgataacgctgaggtggataccgaaggtgaggccgctgagtttgagccgctgggtgacactccagaagaactgagccaagtgactgaacaattaggtaagcacgaagaaggctttcagtcgatggtcgagcaggccgttgagcgtggactgagtgcagagtctgtgactcgtatctacgaagagtacgaagccgatggcatctctgagaaatcctatgcggaactcgaagctgctggatatagccgtgcctttgtggactcctacatctccggtcaggaagcccttgtagaccagtacgtcaatcaggtggttgcctttgctggtggtaaggagcgctttagcgcaatctatacgcaccttgaagcgaccaacccggctgcggctgagtcccttgagactgccatgatgaaccgagacttggcgactgtcaaagcaattatcaatctggctggtgagagttacacgaagaaattcggtaagccagccaaccgtagtgttaccaagcgtgctactccggttaaacctgtagctcgtcagaaagagggctttacgaatcaggctgagatgattaaagctatgagtgacccgcgttaccgtagtgatgctgcctaccgtcaaatggtagaacagaaggttatcgactccagtttctaattaaccctcactaaagggagagaccatagatgactacaatggttgaatcacctgagcacagaactttgtggacgctcccgtaggtgaaacattgagaaccaactcgattcaagtagtaaccaaacttttctttaaattaacataaggagattcaacatggctaacattcaaggcggacagcaaattggtactaatcagggtaagggtcagtccgcagcggacaaattggcgctgttcctgaaagtgttcggcggtgaagtcctgactgctttcgctcgcacctccgtgaccatgcctcgtcacatgctgcgctctattgcttctggtaagtccgcacagttccctgtgattggtcgcaccaaagccgcttacctgaaaccgggtgagaacctcgatgacaaacgtaaggatatcaaacacaccgagaaggtaatcaacattgatggactgctgactgcggacgtgctgatttacgacattgaggacgcgatgaaccactatgacgttcgcgctgagtacaccgcacagttgggtgaatctctggcgatggcggctgacggtgctgtgctggctgaactggctggtctggttaacctgcctgacgactccaatgagaacatcgagggtctcggtaagcctaccgtactgactctggttaagcctaagactggcgacctgactgacccggttgagctgggtaaagcgattatcgctcagttgactatcgctcgtgcgtccctgaccaagaactacgttccggctgctgaccgtaccttctacaccactcctgataactactctgcgattctggccgctctgatgccgaacgctgcaaactatcaggcactgattgaccctgagcgcggtactatccgtaacgtgatgggcttcgaagtggttgaggttccgcacctgaccgctggtggtgctggtgatacccgtgaggatgccccggctgaccagaagcacgctttcccggctacttccagcgctaccattaaggttgctctggataacgttgtgggcctgttccagcaccgctctgcggttggtacggtcaagctgaaagacttggctctggagcgcgctcgtcgtgcgaactatcaggctgaccagattatcgctaagtatgcgatgggtcacggcggtctgcgtccagaagctgctggcgctatcgtgctgccaaagacttcgaaggcttaatggtagcgcctttgagtatgaacgcggagagtgaagtggagccgacccaagaggtagccgccgaagtagctctcacgcctcaacagaaggccgccattactcgtgctcgtaacaaggcacttaagtctcaataacaacaagcaaaccccttgggttccctctttgggagtctgaggggttttttgctttaaaccctcactaacaggaggtaacatcatgcgctcttatgagatgaacattgagaccgcagaagagctatcagccgtcaacgacattctggcttccatcggtgagccaccagtatcaacccttgagggtgatgcgaatgctgacgttgcgaatgctcgacgtgtactcaataagattaaccgacagattcaatcacgaggatggacattcaatattgaggaaggtgtgactcttctaccggatgcgttctctggtatgattccatttagctctgactatctgtccgtaatggcaaccagcggtcagacccaatatatcaaccgtggtggctatctctatgaccgctctgcgaagactgacagatttccttctggtgttcaggtcaacctgattcgtctgagagagttcgatgagatgcctgagtgcttccgtaactacatcgtcaccaaggcttcacgccagttcaacaaccgattcttcggtgcgccggaggtagacggagtgttgcaggaagaagaacaggaagcgtggcgtgcgtgcttcgagtacgagttagactacggcaactacaacatgcttgatggcgatagtttcgttcagggtctattgacgcgttaatagtaaggaggcacttatgccagcacatagaaaagaaataatcaacgggtgtaaagagtgctctaagtgcctcacagttaaaccgttggaagagtttggtaagtcgagcagaccgggtggtcaatcccaatgcaaagagtgccgtcagtcaggtaagcgcggcaggcctgtaagccccacacaacgtgagtctcaccgggcgtgggtgttgctgaacacctatgggataaccgttgatgattttaacaaaatgcttgaggatcaagcgggtgtttgtaagatatgcggtaagggcccttctggtcgattcaagcacctgtgcgtagaccactgccacacaactggacaggtgagaggactactatgccacgcctgtaacaagtcattagggttccttgaggatgaccctgataggattaaacgtctaatagcttatttaggaggtacacaatgtcactaattagccagtcgattaagaacctcaagggcggtatcagccaacagccagatattctccggttcgctgaacaatgtagcgtacagattaacggttggtcttctgagtccgagggtctccagaagcgcccaccgatgattcaccttaagacccttggcgctgctgggtatgtgggtgcgcaaccttacgtgcatcttatcaaccgcgatgagttcgagcagtatttcgcggtgttcactggtgaagacattaaggtgttcgacctcgatggtaaggagtaccaagtacgtggagaccgctcttatgtacgaacagccaacccacgggaagaccttcggatggtaacggtggctgactatacctttgttactaaccgcaaggtggttgtgcagagtaacgaccaatcggtcaaccttccgggctttaaagaccaaggtgatgcgctgattaatgttcgtggtgggcaatatgggcgtagactctcaatcgagttcaacggggctgagcgtgctgctattcaactaccagacggctcacaaccagcacacgtcaatgaggttgacggtcaggccatcgctgagaagctggcggctcagttgcggaataacctaggtaacccaaacaatgaacaaaacccaaataagtggcgcttcaacgttggccccggattcatccatatccttgcgccaaataacgataacgtttggggactacagactaaggatggttacgcagaccagctaatcaaccctgtaacccactacgctcagtcgttccagaagttgcctattaatgctccagatgggtacattgtgaagattgtaggtgacacctcaaagactgccgaccagtattacgttaggttcgacctcaaccgtaaggtgtgggtagaaacaatcggctggaacacaaggacttacctgcactaccacacgatgccttgggcgctggtacgtgcttctgacgggaactttgacttcaagtaccttgagtggggtgctcgtactgttggagatgatacaactaacccatacccatcgtttaccggacagacaatcaatgatattttcttcttccgtaaccgtttaggcttccttagtggggagaacatcatcttgtctcgcacctcgaaatacttcaacttcttcccggcctccgtgtcaaactactccgacgatgacccaatcgacgttgcggttagccacaaccgggtgtcaaccttgaagtatgccgttccgttctcagaagagttactcctatggtctgaccaagcgcagttcgttctgacagcttctggtatcctttcgagtcgctccgtagagttgaaccttacgactcagttcgacgtgcaagacagggcacgcccacatggtgtaggacgtaatgtatactttgcatcacctcgcgcttccttcacatccattaaccgatactatgcggtacaggatgtaagctctgtgaagaacgcagaggacatgacggctcacgttccgaactacataccgaatggggtattcagtatatcgggtacaaccgctgagaacttcgcggctatccttacgagcggagcaccgaaccgggtgtatatctacaagttcctctatattgatgaagaaatcaggcagcagtcgtggtctcattgggactttggggacaacgttacggtgtttgcagcacaggtgataaactcaacaatgactgtattgatgagcaatgaacatgctgtgtggatgggacgcttgcacttcacgaagaactccatagacattccgggagagccttacagattatacatcgacgctaagaggaaatacaccatccctgccgggacgtataatgatgatacctaccagacgtccataagcctcgcagcgatttatgggatgaacttcactaagggtaaagtgtctgtggtcttccctgatggaaagattatagaggtagacccgccaatcaacggttggagcagtgacccggtgttacgacttgatgggaaccaagagggccaagtggtttacattgggttcaacatcccgttcacttatacgttctcgaagttcctcattaagaagactgctgaggacggctcgacggctaccgaggatattggtcgcttacagcttcggcgtgcgtgggtaaactatgaggactctggagcgttcaccatccgtgtgaacaacctgtcccgtgagttcatctacacaatggctggcgctcgtttgggttctgacaatctgcgtgttggtaggtcgaacattggcacagggcagtaccgcttcccggttgttggaaacgctcagacgaacatagtaactatcgagtcagatgcgtcaactccactgaacatcattgggtgcggctgggagggtaactaccttcgtcgttcttcgggcatttaacttaaagtctccctgcggcgaattaaccctcactaaagggagacactaatagatacgaggggttaaagcattatgtacattacaaagtgtttacaaatccatgccgacaactttcagccgtccatagaggacattctggaagctgaggcactaggtgttgaaccaaaggtaattcctgatgagaacactgtggcaatgcttagcgataacgctgtgttggcaattggtggcaatcagggagaccgagtgtggttccttacctctaagtacgtcccactgtttaacttaaaggagcgcttagagtttcgcaagttaatagtcgaatatcgtgatacgatgctgaaccagtacgagtccatttggaacttcgtatgggtaggcaataagtcacacattcgtttcctaaagacaatcggagcggtattccacaacgagtacactctcgatggtcagttccaactattcacaatctcaaggaggcagcgtgaagagatgtaagaaatgcggagaacttaaggctgtctccgagttctataaggacaagaagagtaaggacggcctacggagtcactgtaagccctgtcactacgtgtattacaagaaggactactcaaaggcgcgagagtttaaccttaagcgactgtacggaattactctggaagaatatgaagcgatgctccttaagcaagatggagtgtgcgctatctgcggtcttaccgagagagttgagggacgggcgttagcggttgaccattgccacgccactggcgctgttcgtggtctcctttgctctgcctgtaacatcgctcttgggaagttcgaggacgacaccgagcgtcttcggaaggcaataacatacctaggagggaattgattatgtgttggatggcagcaatcccaatcgccatgatgggtgcccaagctctaagtagccagaacagtgctgacaaggcacgagtggcacagacagaagctggacgccgacaggcaatggagatggtcaaagagatgaatatccaaaatgccaacgcctcgctggaacaacgggacgcccttgaagctgcatcctctgagttgacttcacgtaacatgcagaaggtacaagctatgggaaccatccgtgcagctatcggcgagagtatgctagaaggcgaatccatgaagcgcatcaagcgtatcgaagagggcaactacattcgggaggcaaacagtgtcaccgagaattaccgccgagactacgctagtatctttgcgcaacaattgggacgcactcagtccacagcaagtcaagtagatgcagtgtacaagagcgaggccaagggtaagtctggtctgatgcgtgtactagaccctctgtccattatgggtcaggaagctgcaagtcaatatgcggctggtggatttgacaagaaaggcggcaaccaagcagcacctatcagtgccgccaaaggaaccaagaccgggaggtaataatggctagtaaactaaatagtgttttaggcaatatggcgactcccggtatggaacgactccggggcgtcaaaggtatggactaccgggcagcaaccattcaggctgaacaaccaagggcgagtcttctggactccattagtcgattcgctaaggctggtgccgatatgtatatggcgaaagatgaacgtgataagcaacgagccgatgagcgctccaacgagattatccgtaagctgacccctgagcagcgccgacaggctatccagaatggtacactgctgtatcaggatgacccatacgcaatgcaagccttgaagttcaagacagggcgtaacgctgcgttcctcgttgacgatgaggttcaacaggccatcaaagagggtcgcttccgtactcgtgaagagatggagcagtatcgtcactcacgcctacaggaacagtcgaagtcgttcgctgagcagttcggcatcaatgagatggatgaggagtaccagaagggtttcaatgcgaacatcaccgagcgtaacattgctctgtatggcgcacatgataccttcctgagtgaccaagcgcagaagggtgctatcctgaactcgaaggttgaactcaacggtgtcctgtctgaccctgacctactgtctcgtcctgagtccggtgagttcttccagaactacattgacaactccttggtgacagggatgaccgacaatcaggctcagcaggttatctcttcgtccttgaatgacgtgctacagcgtccgggtggtgccgccttcttgcagaacattgagaaccgcaaggtaactcttaatggcgctacgactacctatcgtgaactgatgggtgatgaacagtggcaggccatgatgattaaggcacagcacactcaattccagaacgacgcgaagttgactgagaggttccaactgagtatcaactctgcgcttaaccaagaggatactggcaagggatgggaggcgctccaaggtatcaaggcggaactcgacaagattcagcctggagaagaacttacgcctgagcgccagcagctcaatgatgcccaagcgcatatgcagacgcgcttcaaacaagaggccgctgagactgcgaagctgatggacaagcagcgtaagaccctgaataaatctttggtcatcgacaagcagttccagaagagaatcaatggtgagtatgtctcaactgactacaaagatatgccaacaaacgagaacactggagagtttgtccatagtgatatggtgaactacgcgaaccagaagttagcgcagattgacgctatggacattccagaggcgcagaaggatcgcatgaagttgcagtacctccaagctgactctaaagatggtgcattccgcactgctgtaggtcagttggtgtcagatgctcgtggtgagtggaaggcggctgtcatcaatggcgagatgcctgatagcacaccagcccttgactccctacgcaagatgcgcaacattgaccccggattgttcgcagcactgtatcccgacgatgccgagctgtttcacacaatggatcaattggatcgacaggggataaagccgcaagccctcattaacgccaccaaatcccgtcaagggaaaacgcgtgaaatgcagattgaggatgagcgtgcgttcagcgagctgatgaacaactctgagcagcccgaactgaaataccttccggcttccatgcgtgagtacgctcagattatttatgactctgagaagtacctaacaggaaaccctaaggatgccatatcagcggttagttcgttcctaaaggacactacctatacattctcttcggataacgtagatggtggaacctacggtgtaatccctcgcaacatgatgcaggtaacagatgaccctaaatcttgggagcaaggtaaggatatcattgagcaagctgttaagaagtaccaagagcaaaacccttgggttaccaacaaacagcttaaggttagccaacagggtaacttaatcaagatttacgataccactaccaacttgggcataagttatgataacgcactgctacgcaaggtgtataagaactatgctgagcaacaggctgcatcggctgagaagaaagccttaacggaagccaataagcgagcacctatcgtcgcggcaaccaaggcccgtaaagaagcagctaagcgtgtccaagagaaacggaacaaggttcctaagtttatctatggacgtaaagaagactaacagtaaactataaggaggctccatgagctacgacaagacgaaaccatccgagtatgatgggttatttcagaaagcggcagatgaacatggggtctcctatgacctgcttcgtaaattagcattcaacgaatctggcttcaatccgaaagccaaaagccctaccgggccgttgggtatcatgcagttcactaaaggtacggcagcggggcttggactcaaggtgacagggggagatgacgatgagagattcaaccctgagttggctgtggacgcagcagctcgtcacctgagcgacctcgttaggaaatacgacggggatgaacttaaagcggccctagcgtacaaccaaggagagggacgcaatggcgctccacaaatgcaggcttatgaccgaggcgattgggcctctatcagcgaggagggccgcaactacatgcgtaaacttctcgatgttgctaacagcccgcgcaagggagacttggaggcgttcggtgggataaccccaaaggctaaagggattcctgctgaggacgcctttgctggaatcggtaaggccgggaaggtaggaactgagcttccacaatcaactggctttaagctggagggtgtggaacaacaggaacctgccgtaccgttcactaaggatttctacgataaacatggaactaccgttgaggaatatgaaaaccgttcaacattcttcgggataaaggacaccacaagtgccgagcttcataactcgctattgggtgttgccttcaatgctgcgcgttttgatgatagttttgacatcttcaaggacgctattaccccaactcgatggaactcctaccagccgacagctgaggatcttgacaagctccgcaacagtgggcttcctccgagttactactcagtggtgacaggtggtgacggtgataactgggatgacctgattaagatggcgaagagaaactacgagatggacgtgaaggctgctgatgctggtgtgggagcacaattggttggcggaatcgtgggagctggtgttgacccattgagctatgtgccgcttgttggtgttgctggaaagggtctcaaggtggtaaacaaggcgttcgttgttggtgcccaaagtgcagccttgggcgcagtttcagaagctgttcgcacatccgttgctggtggtgaggcgcactatcaagatgcaatccttgggggtcttatgttcggggccgggatgagcgcaatagctgatggagtgagtgcagcattgggccgtgttcgcgctggtcaagttagtaacgacttcgaccgcatggctactcgactggaggcgcgtgagtctgcctttcaagctggtggcgaggacttaacacgtatgccaacagagggtcgtacatttgacggggaacatgcgggtgtaaactactctcaacttgaaactgaaccgggggctgtggtgctgccgcaaggtcaaatcttgagtgacaccaacccgattaaccctcagacacttcatgagttcgagcaggttaaccctgagcgagcggctcgtggtatctctttgggtggattcgctgagatcagcctcaagacccttcggtcggagaatgagactgtgcgctccattgcgagtgaccttgtgcgttctccgacagggatggaatcaggctctaacggtaagttcggtgcgactgcttctgacattaaggagcggctccacgcgaacaatcagcgcacctacaatcagctttatgatgctgtgcgtactgcaatgaaagaccctgagttctctacaggtggtgtgaagatgagccgtaaggaagtacgtcaggaaatctataagcgtgctgccttagcgattgagagaccagagctacaatcgggactcacaaagggagaacgtaaggtgatggatatcctgaaacaacacttcgacctcaagcgagaactcatggaaaaccctgctatcttcggtaacgccaaagctcgtagcatcttccccggctcacgccataacggaacctacgtgcctaatgtgtatgaccgcgccataaagttgtacatggtgagtcgctacggtaacgagggactacaacgggcaattgcagagtcgtggcttacatcttaccgcgctcgtccagaagtcaaggcgagagtcgatgagtacctgatggagcttaacggtctcaagacggtacaggaagtaacaccagatatggttcagaagcacgctatggacaaggcgtatggtatatcgcacactgaccaattcacttcctcctctatcattgatgaaaaccttgagggtctggttggcatcgagaacaataacttcttggaggcccgtaacatgttcgacagcgacatggctgttaccctcccggatggtagcacgttctctgtgaacgacctgcgtaactacgatatggctgacattcttcctgcttatgaccgtcgagttgacggtgacgtggctatcatgggtggttcgggtaagacgacgaaggaactgaaagatgaaatcatggcgctggacaagcagtctgagggtaacggctcactgaaaggtgaagtcgaagcactcaaggacaccgtgaagattctgactggtcgtgcccgcatgaacccagagggagctttcggtacgattcttcgctccatgactgacttggctttcttcgctaagaacttctatatgccgttccagaacttcactgaggttgctgctatgttgagtaaaggaaacacctctgcggtacttcatggaatcccactgcttaacgattgggttagccggaggaagcctatgagcggctctgagattaaggagattcacagtatggtgttcgggaaggaactagaccagcttatgcgtccggggcgcgaagaccatatccgtcgccttcgggagtctactgacactaacgcagtggtggctaatgtggttgggactattcgcttcggaactcaggaattgtctgcgcgctcaccttggacgatgctgcttaatggaacctctaactacatcatcgatgctgccagacagggtgtactgggtgatgtggctggggcagcgctcgctgggaaaggatctaagttcggtaaagcgaattaccttaagtctgcctctgtgtcacctgagcagtggaagggaataaagcagttgttccgtgaccacgccactcgtgatgctgacggtaagtttacaatccgggacaaacaggctttcgccaatgacccacggactatggacttatggcgtctggctgataaggttgctgatgagactatccttaggccgcataaggtttcctcacaggacgccaaggcttacggagcggctgtcaagatggtgatgcagtttaagaacttcgtaatcaagtctcttaactcgcgcttcgtcagattgttttatgacgcgactaagaacaacagggctatcgattctgcgctgactgcaatcatctctatgggtctggctggtggttactatgttgctcaggtgcacttgaaggcttacggcctacaggagcacaagcgtaaggagtacctaaagaatgctcttgaccctaaaatgattgcccacgcgtcattatccagaagttcacaccttggttccccactgtctgtctatgatatgattggtggcttgttcggtaatgatacctaccagtacacccgctcaacggtgttaccaaaggaaaagaccgaacgtgaccgaaacaaggcttggactggtaaggaggttgcgggtaacatagtaggggcgatatccaaccaagtaccagctgtaggactagttgggaatattgggtctaccgccatgaatgcctctacgctacttagctctgatggtaagcagagtgaggtagagttccgtactggtgtgttcaacgccatgcgtgagcttgtccccaatgacccgctgacacaacagttgattatgcacatcttcgaagagcagggcatcaagattaaggatgatgcaacacgccctcgccaataaaccctcactaaagggagagaggtcacattctggcctcttctctcttaatgctaatttacaaaggaggtcacatggctacaaatattaagaccgtgatgacttacccgctggatggctccactacggacttcaatattccgtttgagtatctggcgcgtaagttcgtcagagtgacacttatcggtgttgaccgaaaggaactcatcttgaatcaagactatcgttttgcaactaagaccacaatctccacaacgagagcattggggccagcggacggttataacatgattgaaatccgtcgatttacctccgctaccgataggctggttgacttcaccgatggttcaatccttcgggcatacgacctgaacatctctcaggttcaaacccttcacgttgcagaagaggctcgtgacttaacggctgataccattggtgtgaacaatgatggcaaccttgatgctcgtggtcgtcgtatcataaacgtagctgatggtgttgacctcggtgatgttatcactttaggtcaagtcactcggtggaacgagtctgccctgaactctaagaacgccgctgctacctctcaggccgctgccaagacctcagagaccaacgctaagacctcagagaccaacgctaagacctctgagaccaacgcgtaccaatgggcgcagcgtgctgaggactctccggtacagggtagcgagttctctgcgtatcattactccctcaagtccgcaaaaagtgcaacagccgcgcatacgtctgaggtcaacgctaagacctctgagaccaacgctaagtcctctgagactaacgctaagacctctgagactaacgctgcatcgagtgctgctaaggcttctgaggaggctgctaagctgactaacatgaatgactttgctgccgctattgattcagtcaacggtaacaatgttgtcatgaagggtgacttcaccattaaaggaaacggtaaagtatcaatactgaaccacagtgggctataccaagataagaccgttaatggcgtgaactatgccaacaggatttatatggatgatgcaggggccatgcacttcgagaactaccgtgtgtctggtgcttcatccaccttacgtgctggttttgttattacagataccaacaggtttgactttacagggccaacgcgagttaatggtgaatctaccgtatatgtgtatgcgccccctaatccggctattggtcaatacctcaatgctgtggcagttcgctcacagcttcggggccgtggtggtaatggtgatccacttggtgcgtactgtggtatgtatattcaggagcacgttggtacagaccacgcgataatccttaacctcaatggttatagcaaggatactaactggcagctattctccaatggtaaaatatctacaccacttggtgatgtgatgacttcaggttctgatgttagaatcaaggatgatatcactaaacctcttgatggtgctggtgagcgtattgacgcaattggcatagtggaatacacagagattgccaccggggaacgtaaacgtgggtggctggcccaacaacttgacacgattgacccgctgtacacatacctaacgaccaccgcagaaggtagtcttttgaataccaacgacagggcgttgcttgctgacgtaataactgagcttcaagcactgcgtcaacgcgttaaagaactcgaaggacaatcaacaaagccagcggacggcacaacataaggagaacacaatgctttcttttgacttcaataacgaggtcgttaaggctgcgccgattgttggcacaggggtcgctgatggtgcggcccgactcttttggggactatcgttaaacgaatggttctacgttgcagccatcgcctacacagtggttcagattggtgccaaggtagtcgataagattattgactggaaacgtgcaaataaggagtaacctatgagcgacaagactttaatcaagctgctggagatgctggacacggagatggcacagcgtatgcttgctgacctccagagcgaggaacgccgaacgccgcagctttacaacgcaatcggcaaactgttagaccgccataagttccaaatcagtaagctgaccccggatgagaacatccttggcggtctcgcggctggtctggaagactacaacaaagtggtcggccctaatggtctgactgacgatgagaccatcacgctacagtaagtgacatactcaaggttctccacgtggggagcctttatggatgttatttggtgcatctgtgtgaaatctgaaaattgatgggaggtgttatgctaaaacttttacgcagcgcactcccttgggtactcgccgggacactctttatgggtggctggcacttagggtcaacccatgagagagcaaactggaaggaggtaatccaaaatgaatacattgcgaaaacaaaagcaaccgcagcaactcaggcagaggtcagtcgggtatcccgtgagtaccaagaagagattgcagccattgaaggcagcactgataggatgcttaatgacctgcgtagtaataataagcggctgtcagtccgcatcaaaacccttaccggactgccagaagataacggtagatgcgagtttaatggtcgagccgaactacacgagtcagatgctaagcgtattatcggaataacccaagctgccgatgctcacgtaagagcgctccagcgtactattaaggagatgcagaatgagcgacacccaagcaaaccgtaatgcgctaatcattgcgcagcttaagggtgacttcgtggccttcctgttcgtattgtggaaggctttggctctcccgccgccgactaagtgtcagattgatatggcccggtgtctggctaacggagacaacaagaagtttatcctacaggctttccgtggtattggtaaatcattcatcacctgtgcgttcgttgtgtggacgctatggcgtgaccctcagttgaagatactgattgtctctgcatccaaagaacgtgcggacgctaactccatcttcatcaagaacatcattgacctgctgcccttcttggctgagctaaagcctcgccccggtcagcgtgactctgtgattagtttcgatgttggccctgccaagcctgaccactctccgtctgtgaagtcggtgggcatcactggtcagttgactggtagccgtgctgatatcatcatagcggatgacgttgagattccgtctaactccgcaactcaaggtgcccgtgagaagctgtggactctggtgcaggaatttgctgcgcttctgaaaccgctgccgacttctcgcgttatctaccttggtacgcctcaaaccgaaatgaccttgtacaaggaactcgaagataaccgtgggtacaccacaatcatctggcctgcgctctatccgcgtagccgtgaggaagacttgtactatggcgaccgtctggccccgatgctccgcgaagagttcaacgatgggttcgagatgctccaaggtcaaccgactgaccccgtgcgcttcgatatggaagacctgcgtgagcgtgagttggaatacggtaaggctggcttcactttgcagttcatgctcaacccgaacctgagtgatgccgagaagtaccccttacgcctccgtgacgctatcgtgtgcggtctggacttcgagaaagccccaatgcattaccagtggcttccgaaccgtcagaatcgcaatgaagagctacctaacgtgggccttaagggtgatgatattcatagttatcattcgtgcagccagaacactggacagtaccagcaacgcatcctcgtgattgaccctagtggtcgaggtaaggatgagactggttacgcagtgttgttcaccctgaatggctacatctatctgatggaagctggcgggttccgcgatggttattccgacaagacccttgagtccctcgctaagaaagcgaagcagtggaaggttcagacggtggtcttcgagagtaacttcggggatggtatgtttggtaaggtattcagccctgtgctcctgaaacaccatgcagcctctatggaagagattcgtgctcgtggtatgaaggaactacgcatttgtgatacgctggagcctgtactctctacgcaccgccttgtgattcgtgacgaggtgattcgtgaggactaccagactgcccgtgacgctgatggcaagcatgatgttcgctattcgctgttctaccagttgacccgtatggctcgtgagaagggcgctgtggcccacgatgaccgacttgatgcattagcattgggtgtggagttcttacgctctacgatggaactggacgccgtgaaggtggaagctgaggtgcttgaggcgttcttagaggaacacatggagcacccaatccattcggctggtcatgtagttaccgctatggttgacgggatggaactctattgggaggatgacgatgcgaatagcaacaggttcattgactggtagttatgcatattgagtgcataaggaagcatcgagaccacggatggtcactttaagaaactccttaagaatcaatgagtttgaattaaccctcactaaagggagagaggggacttaaagctactatataggttagtcattcaggttatgcaatgaccttttatgcactttaagtctacctctgtgattggtgatattatcattatataatcacctaccttagagcaactgaaaggaggtggctcaatgttacgcttgctgattgccctgctgcgtcatagagtcacttggcgatttcttctggtacttactgctacccttgggtacgcaggccttactgaccacctcggtcaactggaagtggccttttgctctatactctcttgtggggattaaattattgttgatgacagacaagcggctctgagggattcgtaggtatagtttcactacaccaactcatccctgtagagtcaaccctaaaggttatacctaaagatgccctgtagttcgtaatggtcttacagggtcttctggtgtctcctagctatcccttctggatgcgcctatggtctcacctatggtgtggccttacctaaagtggttgcctaaagagaccctttaagaatttaccacaaaaatctgaatgggtatctcacagttcaagaaaccaaagtacccccatagccctcctaaagccacctaaagccagccctacccctagggtttaaccttcggttaaccttgggtatctcctcaagtggcctataggatagcctaaagtgttgcataaagtcaatacctaaagaggcggatggcttaaagaggccttgaagagtgtcctagtgtaccagttcgatagtacatctctctctttgtgtccct

SEQ ID NO: 22 - DNA, 40394 bp, Unknown
  source: /note="Description of Unknown: KP2W-P0102 Bacteriophage sequence"
atctgttatcctcctaaagtaaaccctaaagccatcacctaaagccaccacctaaagaccagacctaaagccaccacctaaagaccagacctaaagccaacctaaagccaccacctaaagaccagacctaaagccaccacctaaagaccagacctaaagccatcacctaaagagtgccgctatcttaaagacaaccagaccgatagacccattgttaacctgtagtgatgccttgtagttatctgtagtcatttcataaaccctcactaaagggaataagggatacttaaagagggaataagggatttaataaaaagatttaatttaatggttgactttaagtaacccttaaggctattattcatcacgtcaacgggacaacggccttaaagccactccctgagatactggagtcaaccggataagtagacagcctgataagtcatacgaaaaacaggcattgacaacatgaagtaacatgcagtaagatgtaccacataacgttaaccaccgctctggtgtcttctaggtgacttaagcgcaccacggcacataaagcgaaacaaaaatggttgacaacatgaagtaaacacggtacgatgtaccacatgaaagacaccgagtgtcgtaggtgtaaaaacgcgacatagtggatagatggcgaaagcacaagcgaccacgataataaagagcttgtcgcacttataacgcaagtgacggctaacactgaaatagcctcggctcaacgaaactgtagcctaaagttctttaacaatctggataatagctcttgagtgtaccgatgtataagcgaataactcaaggtcgcactgaaagcgtggcctttatgatattcacttaacacgaactaacatgaggtaacaccaaatgattttcactaaagagcctgctaacgtcttctatgtactggtgtcagcattccgttctaaccttgatgatgaggtgaacatgagtcgccaccgccacatggtgagcgaattacgtgccgcaccgggtatctacggcgagcttgagtctaccgatttgaccgggtgctatcgtgagagtatcgcactggctccaaccgaggaaaagaccatgcgtgtactctgcaagaacaaagagcaggcactacaggtagctcgcttagcttgcaatgagtatgagcaagattgcgtactggtatacaaatcacagactcacacagcgggattggtgtacgctaaaggtatcgacgggtataaggctgaacgcctgccgggtagcttccaagaggttcctaaaggcgcaccactgaaagggtgctttacgattgacgagttcggccgccgctggcaagtacagtaagtgatagactcaaggtcatgcacgatgcgtggcctttatgattatcactttttgactatgaaggaatcacaccatgcgcttaaataaagacacagcggtagctatgcggtcagcaatcgaatcaagagccgcacacaacgtgggagggattgctgatgttgcacgggtttataaggagaaagggcttacattccgcagattcatgtgggactgttatcatgcagtgggctttaaagagactacaagaatcatcgcagagcacaacacggtgacagttatcggcgggcacataacagatatcaatgattcgcacatcgaaactatgctcaaggttgcactgaaagacatagcttattagtaattaactacaggtcgttagctcgtagcggcctgaatgataattactaaacaaacctgagaggatatgactatgaaacaatacgccatccttattcccggctggtgctactcaatgacctgctacgggtacaacgaaagggacgctcgtgccagattcagggatcaacaaggcttcggcaagcgtttacctaatggtacggctgtatgggaggttatgtaatgagtaagttactggcaacctctaaaatcaaaggccaatgcactgtaacgctgcgtgagtattaccacgggtcaatgggatgcacctatgttgtgcgatacggtaaacaggtcacgcactgggtaaaccttgttttggcacaagaggagtaccaagcctgtgtgatacaccaagcaacatgtgcaggctggaacgactgacaacagacttcaagtctatcaggtggtaaactcaaggtcgctccatgcgagtggcctttatgattaacattacgatagaggatgagagtatgggatacgaagacacgaagaacctgataattctctgtatagcaatacccgctgcaatcaactttgtgtacgaggtatggattaagaaatgattatcgcactaatcgcactggtctatctgtgcatcgctatgtactttatgcgagactttaagcgcggtctggcaatacacaaggcaacgctgagttactttaagtggggattcatcccacggtttacggttcgtgaacgtaacggacgctttaaggccaacaaggtgggagtattctacattgctacgcactaactcaaaacacgtaaagattgcactgtatgcgatggcttatggtgcatcgaaacgcaaggtcaaacgcatcttaacgagacaccgcaagatgaccgcacgacaggctgcaagcgctgtcaaatgggctgaatttactctttactcttcttacagataacaggacactgaacaatgactttcaccgaagcacaagccgcactcgaagctatccgcaacctgccgattgaccgcttggatgaacgccagcccatgctggtggctcttgcggctgctatcgtgaacgatgagactcaagacggcgaactgacgcaggccaaaggcaattggggcttggagtctatggactactggcagacactggctgagcgtatgcgtgatgttggatttgtacgcttgggtaacggtcactttagcgcagcatacgagcacgcattgttaccgggcaaggttatcaaggtaggctttaagaaagaggactcaggcgctgcctatgctgccttctgccgcatgaatcagggtcgtgagggtatccctacggtgtacgacattcagcgtcatacaggctgctacacggtggtcttggactatctgacaccgcttaacgattggtgctacggtgaaagcgataagattcgtcaccactttcaggccgcacgggaaatcattgaggaggattgcttcgataccgccgaagagtacccgataagtgacgggttcattgagacctgcaaggatatccgcaagttcttcctaggcattgcatcgttcgattgtcacagcggtaacatgatgaaagaccaaatgggccgattgattatcacagacccggtatcgttcagcgcagacaacaagttaaagccgggtgagtttcactgtgacccggatgaactaatcgctgagattgaggcgctgagggcgcaggaagcgattgaccgctgtaaggcacgcaaggcacgccgtgaccctaaaggagactttcaggcagcacgtaaagcccgtgccaaatggcgcagaaaggcctctaagcgtgctaaacgtgacgctaaggtaatcgctaagatgcgcatggatgacaacgagcaacgcagggccgagccgagggcgcgcatgttgtggggcgataagcactggcgtaacgcttgggtgcagcacatgaatgttgacttcgcacggctcgaactgttagcagccgcacagatggcacagatagaccacaaggctatcgtatggggcaagccgttacacatagacgcataccttgacaagagactgcaaggttgatagagtcttttcttacaggtcatcatgaggtggcctgaataggaacgatttatccatagtgaggcaagcaatgaacatcatcgaaactatcgaaaagaatgacttctctgaaatcgaactggctgctatcccgttcaacacgctggcagaccactacggcagcgcactggctcgtgaacaactggctttagagcacgagtcttatgagttaggtgagcgccgcttcctcaagatgctggagcgtcaagcgaaagctggtgagattgcagacaacgcagccgctaagccgttactcgctacgcttctccctaagttaaccgcacgcatcgttgagtggctcgaagagtacgcctctaagaaaggccgcaagcctagcgcatacgcgccgctccagttactcaagccggaagcctccgcgtttatcaccctgaaagttatccttgcatcactgaccagcacgaacatgacaaccattcaggccgctgctggtatgttggggaaggccattgaggatgaggcacgtttcgggcgtatccgtgacctcgaagcgaagcacttcaagaagcacgttgaggaacagcttaacaagcgccacgggcaagtctacaagaaagcctttatgcaggtggttgaggcagatatgattggtcgcgggctgctgggaggcgaggcgtggtctagctgggacaaggaaaccacgatgcacgtagggattcgactgattgaaatgctcattgagtccacgggtctggtggaattgcagcgccacaacgcaggtaacgcaggctctgaccatgaggcactgcaactggcccaagagtacgtcgatgtgttagcgaagcgtgcaggagcactggcgggtatctctccgatgttccagccgtgtgtcgtaccgccgaaaccttgggtggcaatcaccgggggcggctattgggctaacggtcgcagacctttggcactcgttcgcactcactctaagaagggactgatgcgctatgaggatgtttacatgccagaagtttacaaggcggtcaacatcgcacagaacaccgcatggaaaatcaacaagaaagttcttgcggttgtcaatgaaattgttaactggaagaattgcccggtagcagacattccatcactggagcgccaagagttaccgcctaagccggacgacattgacaccaacgaggcagcgctcaaggagtggaagaaagccgccgctggtatctaccgcttggacaaggcacgagtgtctcgccgtatcagcttagagttcatgctggagcaggccaacaagtttgcaaacaagaaagcaatctggttcccttacaacatggactggcgcggtcgtgtgtacgctgtgccgatgttcaacccgcaaggcaacgacatgacgaaaggtctgctgaccctcgctaaaggcaagccaatcggtgaggaagggttctactggctgaaaatccacggtgcgaactgtgcgggtgtcgataaggttcctttccctgagcgcatcgcgttcattgagaagcacgtagacgacattctggcttgcgctaaagacccaatcaataacacttggtgggccgagcaggattcacctttctgtttcctcgcgttctgcttcgagtatgcaggagttgcgcaccacggtcttagctacaattgctctctgccgctggcgttcgatgggtcttgctctggtatccagcacttctccgcgatgctacgcgatgaggtaggcggtcgtgcggttaaccttctgccaagcgaaaccgtgcaggacatttacggcatcgttgcacagaaagtaaacgagattctcaaacaggatgcaatcaacggcacgcctaacgagatgattaccgtgaccgacaaggacaccggggaaatctcagagaagctcaagctgggaacctcaacgctggcgcaacagtggctggcatatggtgtaacccgtagcgtaactaaacgttcggtcatgacgctggcttacggttccaaggagttcggctttcgtcaacaggtactggacgacaccattcagcctgcgattgacagcggtaagggcttgatgttcacccaacctaaccaagcggctggctatatggctaagctgatttgggacgcggtgagcgtgaccgtagtcgcagcggttgaggcgatgaactggctcaagtctgccgctaagctgctggctgctgaggtcaaggacaagaagaccaaggagattctgcgccaccgttgcgcggttcactggactacgcctgacggcttcccggtctggcaggaataccgcaagccactccagaagcgtcttgatatgattttcttagggcaattccgtctgcaaccgacgattaataccctcaaggattcaggcattgacgcacacaagcaggagtctggcatcgctcctaactttgttcactcacaggacggtagccacctacgcatgacagtcgtttatgctcacgagaagtatggcattgagtcctttgcgctcatccatgacagctttgggactattccggcagacgctggtaagctctttaaggctgtgcgtgaaacgatggttctcacctacgagaacaacgatgtgctggcagacttctatgaccagtttgcagaccagctacacgagacacaactggacaagatgcctccgcttccgaagaaagggaacctgaacctgcaagacattctcaagtctgactttgcctttgcataacaagcacttagcattaaccctcactaacgggagactacttaaggtctcccactttaagacactttaggtactaagagattaaatttatgattaacattaagactttccttaagaacatctttaagttaaaccgcttgacttccgttaagttctacgcttggatgcccggtagtgatgacctccgcaagactgaatttaagttaggcttaggccgtgcggtaaggtggtcacgaagttggaatgttactcaacggcctccgggatggtcatcttccagaccactgaggacaacgaaatgaaatccttctactacccgaaaggttcaacatgtggtcgtatcgaacgggcatacagttaaccctcactaacgggagagttaaacttaaggtcatcaccagcggtggcctttgtgattaactttcaatacacatcaacatgaggtaagatactatgcgtaccaactttgagaaatttaccaagcgcgattcagtggtcaacgagcatggcgaacagtggcaagagcgccgtgaccgcatgaagaaactccacaagcaacagcgcggtaactcacagaaacgggagtggaactaatgatgggacgtatctatagcggcaacctgaacgattacaaagatgcggtagagcgtctacaggaagaccatgacgtgaccgtgaaggtggagtcattcagttatgaaaacccagcgaagatgtgcaggtcatccggtgaggttctccgtgtgttcacacgctccgggcatctggtggcatccagaaccttcgagcacagcgacagcgatgtacaaatcaacgcgcagactgcacggctccgtaaggttcacagcgatttgaaacactggaagtaataaccctcactaaagggagaacgaaaggaggaaacattatgagaatttcatttgacttaatgagtccttcctttctctcatgggatacgggtcgtcacactggcggctctattcgaaacggctatagaagggttcgttatgaaggtaagtggttaaaccatcacatactcatttgggaacacttcaacggtgcagtcccggagggaatggaagtagaccacattgaccgtaacaaacttaacaacgcgcctagtaaccttagacttgtgacccgctctgagaacaacagaaatcggtcagtacaccggaacaacaagtcaggaatcaaaggtgtctactggcacaaacaccgacaagtttggtacggtcagtgtcgaagaggaaacaaaacatttatcaccgctggttgctccacgaaggaacaggcggcagaacttttagagaaactcaaagaggaaattaattatgatgattttcaaaaccgtcccgtataaggctgtgtcattcgtagagtctgccgttaagaaagcgctggagacctccggctacctaatggctgatatcaaatatgatggtgtgcgcggtaacattgtggttgacaacgtggctgaggccgcatggttgtctcgcgtatccaagttcatcccggcgctggaacacctgaacggtttcgataagcgctggcagcaactactgaacgatgaccgctgcatcttcccggatggcttcatgctggatggtgaactgatggtcaaaggcgtagacttcaacacggggtctggcctactgagaaccaagtggctcaagaagaacaacttcatgtttgaccgtggtggtgttgagccgctgaaaggttccaaagtagcctttgagttggacactaagcgcctgagcgtgcgcctgtatgcggtcatgccgattcacattgcggagtctggcgaggactacgatgtacagaacctgctgatgccgtatcatgtggaagccatgcgcgctcttctggttgaatacttcccggaaatcgagtggcttatcgctgagacctacgaggtctacgatatggattcgctgactgaactgtacgaagagaagcgtgccgaaggtcacgagggtctcattgtgaaagacccacaaggcatctacaagcgaggcaagaagtctggctggtggaagctcaagcctgagtgtgaagctgatggtatcattcagggtgtcaattggggaaccgaaggtttagccaacgagggcaaagtgattggctttagtgtgcttcttgagactggtcgtttagtagacgccaacaacatctctcgcgcactgatggacgagttcacagccaacgttaaagcccacggtgaagacttctacaacgggtgggcctgtcaggtcaactatatggaagagaccccggacggctccctgcgtcaccctagcttcgagaagttccgaggcactgaggacaaccctcaagagaaaatgtaaccaactcactggctcaccttaacgggtgggcctttcttcgttctagggaattaaccctcactaacaggagacacaccatgtggcttatcctattcgctatcgtcgcaacgcttggattaatggctgccgacgacaacatttggcctgattgttaaggagacaacatcatgcgtttacacttcaacacatcaaatggtatcttttcggttcgccgtgaagaccgctctacagcagtggcctctgagcgcaacgccaagctgccgctgattggttcggtcgtcccattgtcgccgcgtgttcacctactgatcactcgtggagagttcattaaggcgatgaacaaagagcgcccgcatctggaagccgtggtcacttactggcctcgcatccgtctgttcgttaagtggattaaggaggttctgtaatgctacaacatcattggaacaaaccagacttagaggctcgcttcccggttaactctgctgtgcgatactccggcgacttcctcaagcgcttcttaggcatgagcggagtggtcactggtcactcgaacacaggtcgcgttaaggttcgcttcggtaatcagcacgctgagtttcttcctgacaacctgattccgctgcctaaagctgacgttaagactccgaacgtggaagcaccgaaggcagaattcaagtctgacgtgacccacccgaaccattacatgctgttcgacaacgtggaagccattgaggttatcgcccggtcaatgaccgtcgaggcgttccgtgggtactgccttgggaatattttgaagtaccgcctgcgtgctggcaagaaatctgaactggcaactatggagaaagaccttaagaaagcggctttctatcaggaactgtttgataaacataaggggctgtgttatgacgcttcgtgaatgctgcgattggtgtgccgctaagtggaaccaagctattgaggatggtgataaggcggctgctgacgcttaccaacaattgtacgcgctgtgggagcggcgctttaaggaggctcaaagtggagcaacgtgaacagaaatacctcctgacgatagaaggcaacaccgagtcctttgaggttccggtattcgcccggtctctcgaagaggcaacgctacaggctgaacattatgaggacgctgggttcgtagtgactcgcatccgtccagaagtgaaagcctaattaccctcactaaagggaacaacccaatcattaaccacaaaggagaaacattatggctggtttcaagaagaaaatctacacctctggtcttggcactgctgagccttatgcttacctgagtaagccggattatggcaacgaagagcgtggcttcggcaaccctcgtggtatctataaggtagacctgactctttccaataaagacccgcgctgtcaggcaatggtcgatgaaatcgtgaagactcacgaagaggcttatgctgctgccgtggaagagttcgaggctaaccctccgcaggcacagcgtggtaagaaaccgctgaaaccttacgagggcgacatgccgttcttcgataacggtgacggtacgactaccttcaagttcaaatgctatgcgtctttccaagacaagaagaccaaagagaccaaacacatcaatctggtagtggtcgatagcaaaggtaagaagattcaggacgttccgattatcggtggtggctctaagctgaaagtgaaatactctctggtgccttacaaatggaacaccgctgtgggcgcaagcgtcaagctgcaacttgagtccgtgatgctggtcgaactggctaccttcggtggtggcggtgaagatgagtgggccgatgaagtcgaagacggtggttacactgcgagtgaatcccgtcagtcccgcgatgagcaggagtggcaggaagacgagcacgaagaaaccccggatgaggatgaggatttttaaatggaacttaaagagaaactaaaggcttacagcgaagtttctcataacgggtgctgggagtggcaacgctaccggatgccctgtggttacggtaggattagacacggaggccgaatggaactaacgcatcgtctatcctacctagcattcaacggggatatacctgagggtcttgttgttcgccataagtgtgacaacaaatgctgcgttaaccctgagcaccttacgctaggtactcaaaaggacaacgttaaggatgcaatagaccgtggtcaattcgtctacagggagaacccgaaaggcgcaaagcaccacatggctaaacttaatgagaaacaggttatggaggtttacaactcgacacagacccaaagcagcctagcagagacctatggtgtatctcgacaattaatcagcgcgattaagagaggtaaactatggcagcacgttacgcagcacgtggagttaaacgagtagggtcatatagaagcggcttagagcagaagaacatggagatgctggaacgtaagggaatcaagggacagtatgaaatgtggtctattccctatgttgtccctgcatcgaaccacaagtacacaccagacataatcctacccaacggaatcattattgagaccaagggtctatgggatagtgaagaccgtaagaaacacttactgattcgtgagcagatgcctgagttggacattcgtttggtattctcttcgagccgctctaagttatacaaagggtctccaaccagttacggtgagtgggccgaaaagcatggtattctatttgctgacaagctgattcctgtggagtggcttaaagaacctaagaaggagataccgtgggataaactaattgcaaagaaaggagttaagaaataatggctaaggtacaattcaaaacgcgcgcttctacggaagcaatctttgtgcactgtagtgcaaccaagccaagccagaacattggcgttcgtgagattcgtcagtggcacaaagagcagggctggttagacgtaggatatcacttcatcatcaagcgtgatggcactgtggaagcaggccgcgatgaactggctgtaggttcccacgttaaagattacaaccacaactccgtaggcgtatgcctcgttggtgggattgatgataaaggcaagttcgacgccaactttacacctgcgcaaatgcaagcgctgcgtagtctactggtcacgctgctggcgaagtatgagggttcagtccttcgtgctcaccatgacgttgcacccaaagcctgcccgtccttcgacttgaagcgctggtgggagaagaacgaactggttacatctgaccgagggtgatgccatgaggatgatttgtattcgctgtgataaaccgttgaagagtcgtgtaccgtcacgtcagtgtcagtgcaaagacccaatcaaggcggaggaacacaccgaggaataattaacactcactaaagggagacttaacggtttccctttgttctcgcaactgattaaggaatgtacaatggaacgagaagacgatagtatctttctgtttcatgctccatgtgaaaactgtgggtcttctgatggtaactctgtgtactctgacgggcatgaatggtgcttcgtgtgtgaacatcgagtacccgcaaacaaagagcgtgaagcaaagttatcaacgagaagacgcacaggaggcagtaagcctatgagctatgacgtatggaatttcggcgacagcaacggtcgatactctgacctgactgcccgtggcatctcgaaggagacatgccaaaaggctggctactggctggcgaaagtggacaaccgaatgtatcaggttgccgactaccgagaccagaatggctccatcgtgtcgcagaaggtgcgcgataaggacaagaactttaagaccaccggaagccacaagagcgatgcattgttcttgaagcacctctggtctggcggtaagaaaattgtggtcacggagggcgaaattgatgcgctcactgtgatggaactccaagactgtaagtacccggtcgtatcattgggtcacggtgcctctgctgctaagaagacatgcgccgctaactatgaatactttgaccagttcgagcagattatcttgatgttcgatatggatgatgcaggccgtaaggcagttgaagaggccgcacaggttctcccggctggcaaggttcgtgttgccgtgttaccgtgtaaggacgccaatgagtgtcacatcatgggtgaagacaaagcaatcttggagcagatctggaacgcgaacccttgggtgcctgacggtgttgtttccgcgttatcactcaaagaccgcgttaaggaagctatgacctccgagtacgctgtaggtttattatttgatggctgtcaaggcctgaacgatagaaccttgggtgcccgtggaggcgaagtcatcatggtcacttccggttcaggtatgggtaagtcaacgttcgttcgtcaacaggctctgacttggggcaagcgaatgggtaaacgtgttggcctagcgatgctggaggaatccgttgaggataccattcaggacatgatgggcttgaacaataaggttcgtctgcgtcagtctgatgaagtcaagaaggctatcgcggaggacggacgtttcgatgaatggtatgatgaactatttggagacgatacgttccacctttatgactcctttgcggaggccgaagctgacaggctgttagcaaagctggcctacatgcgaacaggcttagggtgtgatgttatagtgctagaccacatctcaatcgtcgtgtctgcctctgaggaatcggatgagcgtaagatgattgaccgcctcatgactaagctaaaagggttcgctaagtcaactggtgttgtgctcgtagtgatttgtcacttgaagaacccggagaaggggaaagcgcatgaagaaggacgcgctgtgtctattactgacctacgtggtagcggtgccttgcgtcagttatctgatactatcatcgccttggagcgtaaccagcaaggtgatatgcctaacttggtgttggttcgcctgcttaagtgtcgtttcactggcgacactggaattgctggatacatggagtacaacagagaaaccgggtggcttgaaccgtctagctacactggcgaagaaggagaaggagatactggctggactgaacaagacggacagtcagacttctaaaggatgcccgtgtgggcattccgattgcgatggaatcatgtaccactaattaaccctcactaacgggaacaacctcaaaccataggagacacaccatgtttaaattcattaacactttaggcaagctggtagtaaaactgtacttcatcgaagccaagaagctggacaagaaggccaaagctgattcacagcgagccattgagttggcgaaacagtcccgcgagaaatccgatgcggctgttagtggcatccacaagtcggcagcgattgcagccaaagcacagtccatgagcaaattctttgagtaaggatcgaacactatgagcaagtcaatcactcacgcaaacaccatccgtctgccagacaccgccgaccagttctcccgccgagtacacatcaatgtgcgcggcgagaaggtcacgatggtctaccgctggaaagaccacaagtctccgaaagcacacactcaacgaatgaccttggatgacaagcaggtcggtcgcttgatgggtgcccttactatggctgctgacaaggtggtcggtgataaccgtgagcgtctggtagagttcggcgctggtatgcaagagattatcgagaagtgataaactcaaggtcgcccaagggtggcctttatgattatcatttagcacgaaaccaaaggagggcattatgctcgtaagtgacattgaggccaacaacctcttagagaaagtcaccaagtttcactgtggcgttatctatgactaccgtgatggtgagtatcatagttatcgtccgggcgacttcggggcgtatctggatgcgctggaagccgaggtgaagcgaggtgggcttattgttttccataacggtcacaagtatgacgttccggctttagagaaactcgcaaagctgcaactcaatcgtgacttcaagttaccccgtgagaattgtattgacacattggtactctcgcgtttacttcatgcgaaccttaaagacacagacatggggcttcttcgttccgggaaactacccggtcgtcgcttcgggtctcacgctctggaggcatggggttatcgcttgggcgagatgaaaggtgaatacaaggacgacttcaaggctatgctggaagagcagggcgaagagtatgttgatggtgctgagtgggtttcgttcaacgagccgatgatggcgtataacgttcaagacgttgttgtcactgtcaagctcttagagaaattccttacagacctccactacttccctgctggtatggacttcacgaagtacgatgcggatttattctggcgtgaagctggcgagtctgtggatattgaacatcgtgcagcgtggctgttagcgaagcaggagcgtaacggcttcccgttcaacacacaggccattgaggaactttatgtagaactggcagcgaaacgcgccgaacttctgcgaaagttaaccgaaacgtttggctcgtggtatcaaccgaaaggtggtaaggaactcttcaagcacccacgtacaggcaagccactgccgagttatcctcgcgtggtctatccgaaacagggtagcgtgtacaagaagcctcgtaataaggcacagcgcgaaggtcttgaaccttgcgacttggacacgagggactacatggagggtgctccgtatactccggtagagttcgttacgttcaagccaagtagccgtgaccacattcagaagaaactacaggaggccggatgggttcctgagaagttcaccgagaagggtgcgcctgtggtggacgatgaggtcttggagcatgtacgagtagatgaccctgagaagcaggcgtgcattgacttgattaaagagtacctgatgattcagaagcgtatcggtcaggcggcagaaggagacaaagcgtggttacgttatgttcaagatgacggtaagattcatggagccgttaaccctaacggtgcagttactggtcgtgctactcatagtttcccaaaccttgcacaagtacccggcgttcgttctccttacggggagcagtgtcgtagcgcttttggtgctgaacatcatttggatgggattactggcaagccgtgggtgcaagcagggatagacgccagtggcttagagttgcgctgtctggcacacttcatggctcgattcgacaacggagagtatgcgaatgagattctcaacggtgacattcacaccaagaaccagaacgctgcggaactcccaacgcgagacaacgccaagaccttcatttacgggttcctttacggagccggagatgagaagattggtcagattgttggggcagggaaggagcgcgggaaggaactcaagaagaaattcttagagaacaccccggcgattgcagcgctacgagaagctatccaacaatctctcgttaagtcttccgcttggattggcggtgagcagaaagtacagtggaagcgccgttggattaaaggtctggatggtcgcaaggttcacgtcaggtctccacacgcagcgctcaacacattgttgcagtctgctggtgctctgatttgtaagctgtggattatcaagaccgaagagatgctcattgagaaaggcttgaagcatggctgggatggtgactttgcgcagatgggatggattcatgatgaagtccagattgcgtgccgaacagaagagatagccaaggtcgtcgtagaggtagctcaagaagctatgcgctgggttggtgaacattggaacttccgttgtcgcttagacacagaaggtaagattggcccgaactgggcggtttgtcactaaggagtatttatgggaggcgtggctacactaaggttccacaagatgccgaccgggtgtgtagtctgcgtttcacataagcgcaatcacgatggctacttccggtacagtatagggtcgtccagaaagggcgagaagaaatgctttatgtttcaccgctgggtttgggaacgacaccgtgggcctataccagaagggtatgagatagaccacttgtgtctcaaccgtgggtgctgcaacgtagaacacttacagtgcataccgaagcgtgaacacataatcaaaaccaacaaagagcgcagtctcgtaaaggagaaacattatggcaatgaccaaacactttaaagtaaccttcgacgttaccgctgtgattgacagtgaatccgagaagaatctgaacgagttgctggtagacctagctaagaaggccggggctggcgagaagctgaatccgttcaaacaagaactgcttattcaaggtctgacacacgggccggaaggtgctgctgcgttctgtatcaagcaaggtctccgtgagtttatccgcgatggtcacagtgagttaagctctaccgagcagaagctgatgagattctcacctgcaaccgtgcgcgaggtgttcaaatgagtgaatacctgaaagttctggcagctatcaaaggttgccctaagtcctttcagtcgaactatgtgcgaaacaatgcggctctcgtagctgaggccgcttctcgtggacacattagctgtttgactgtgggtggtcgaaatggtggagcatgggaggtcacagcctctggtgtgcgcttcctgaaacgaatgggaggttgcgtatgattatgcctaagagtgacaccgtaacgatgacccgtgatgcgtggaacgatgttagcgcgtatattgataagctggagaaagacctagagttcctgaatgcgcttaaggcgtgtggtgtggataattgggacggatactctgatgcagtcgaaatggtttacggggaggatgacgaatgagcctaatcacattgaaagacttcgtggagatgcgtgaaggtaagcctatggagaatggagtgctggtcatggatggtgactggttggtatatcagtcaatggctgctgccgaagttgagacggattggggagatgacatttggactcttgagtgtgaccacgccaaggcacggagcattctcgattctgcaatcgaatcgtaccgaacccgtaagaaggcttggagtgacgctatggttgttctggcgtataccgacgatgtgaactggcgtaaggtactggttgatgagacctataaggagaaccgtaaggcgacccgtaagcctgtgggctaccgtgacttcctgtcgaagttgtgggagcgcgatgagttcattcacatcaaagaggacatgctggaaggtgatgacgttatgggtatcattgggtctggtcacgaggtcttcggcttcaagaaagctgtgttggtctcctgtgataaggacttcaagactatcccggacgttgacttcctgtggtgtaccactggtaacatcttgacgcagaccaaagataccgctgattggtggcatctcttccagaccatcaagggtgatatgactgatggctactcagggattcccggctggggcgatacggcagaagccttcctgaatgacccgttcattgtggagcctgtagagtccgtgttgaagtctggtaagaacaaggggcagacagtaaccaagtgggtgaagcgtgctcctgatgcgactgagacgctgtgggactgcattaaatccattggtgccaaagctgggatgaccgagcaggaaatcatcaagcaaggccagatggctcgcattcttcgcttcgaggaatacaattacattgacaaggagatttacctatggacgccgcaaagctgattaccgtcgctgtgctggtaggtatgctggcgcgaggtctctggatgttcgctctcatagtccgagacgttaatcgagactccgagattaagtgataaactcaaggctctctgtattaaccctcactaaagggaagagggagcctttatgattattactttaagacttaaccttaagaggtgaaattatgttacaaccaattaatcatgttttaactcatcccgatgatattcctagtatgcctcgtgcagctaaagagtatctacaggtgcgcttcaatcaggcctatgtggtggagtccggggagtaccgtgcgctccgcgctgcgggttactctgagtctttcattgctggtgtgatgcatggtctgtaccttgcctctcgaacacttgatgagattgaggtgcgtaaagagcaactgagacaggagtaattatatgtgctggaaaccgaaggtgaaagtccctaagatggacactaaccagattcgcgctgctgaaccagcacctttgactgaacctccgaagtctgtggtatggggaggcgatgatgacgaggacaccagcgtgtcttcctctgaggtgccaacctcaccgagcagcggtaagagcagtctcaaggtaaagctggatgacagcgcagccaagaacaagagtaaatcctccattcgctcaaaggcgtttgggtaactgagtcatagtatagggagaaacatcatgggattcttcaagaaaatcaagaaggctgttaagaaagttgtgaaggaagttagcagaccagtcgagaaggcaggtaaggaagttggtaaggttgttggaggcgcgctgggtgcaggtaagcaggagattatccaacaagaggctccagcaccagtagtagctgcaccgccaccagcacagattgtagacgtacctgaacaggataaggctgagggcgaggatgaggcgcaaaccgagagcgcacgtaagaaggcacgcgctggcggtaagaaagcacttagcgtagctcgcagttccggcggtggaatcaatatctgaggaggactgaatggctgattcaaaacgtacaggattgggcgaagacggtgctaaagctacctatgaccgcctgacgaacgaccgtagagcctatgagactcgtgcggaaaactgtgcgcaatacaccattccgtccttgttcccgaaggagtccgataacgaatctaccgactacacgactccgtggcaggctgtaggtgcgcggggtcttaacaatctggcctctaagttaatgcttgcgttattcccgatgcagtcgtggatgaagctgaccattagcgaatatgaggcgaagcagcttgttggagaccctgatggactcgctaaggtggacgaaggtctgtctatggttgagcgtattatcatgaattatatcgaatccaacagctaccgtgtgacgctctttgagtgcctcaagcagttgatcgtggcaggtaatgcactgctttacttaccggaacccgaaggtagctacaatccgatgaagctgtaccgattgtcttcttatgttgtccaaagagacgcatacggcaatgtgttacagattgtcactcgtgaccagatagcctttggtgctctcccggaagacgttcggtctgcggtagagaaagctggtggtgagaagaagatggacgaaatggtcgatgtgtacacccatgtgtatctcgatgaagagtccggcgattacctcaagtacgaggaagtagaggacgttgagattgatggctccgatgccacctatcctactgacgctatgccctacattccggttcgcatggttcgcattgatggcgagtcttacggtcgctcctactgtgaagaatacttaggtgacttaaggtctcttgagaatctccaagaggctatagttaagatgagcatgattagtgcgaaggtcataggtctggtgaatcctgctggcattacgcagccccgtagattaaccaaagctcagactggtgacttcgttcccggtcgccgagaagacattgatttccttcaactggagaagcaagctgactttaccgtagcgaaagctgtgagtgaccagatagaagcacgcttatcgtatgcctttatgttgaactctgcggtacagcgcacaggtgaacgagtgaccgccgaagagattcgatacgttgcgtcagaactggaagatacgcttggtggcgtatattcgattctgtctcaagaactgcaattgcctctggttcgtgtgctcttgaagcaactccaagcaacctcgcagattcctgagctaccgaaagaagccgttgagcctactatcagcacaggtctggaagcaatcgggcgtggtcaagacctcgataagctggagcgctgtatctccgcttgggctgctctggctcctatgcagggagacccggacattaaccttgctgtcattaagctgcgcattgctaacgccattggtattgatacttctggtatcctactgacggacgagcagaagcaagcactgatgatgcaggatgcggcccaaacaggtatcgagaacgccgccgccactggtggggctggtgttggtgctctagcgacctcaagtccagaagctatgcagggtgcagcagcacaggctggcctagacgccacctaataaccctcactaaagggagacctcatctttgaaatgagcgatgactaaaggttggagtcctttggtttccctttatctttaacaacttaggagatttaacaatggctgaatctaatgcagacgtttatgcgtccttcggtgtgaacaacgcggtaatgaccggaagtacacctactgaacacgaacagaatatgctgagtctcgatgttgctgcccgtgatggcgatgatgcaatcatacttagcgaggaacctagttcttatgacgatgacccttatgcggctggtgaagacccattcgctgatggtgaagacgatgagggccgcattcaggttcgtatcagtgaagatggtaacgaagctgagttcgacactggtagcgataacgctgaggtggataccgaaggtgaggccgctgagtttgagccgctgggtgacactccagaagaactgagccaagtgactgaacaattaggtaagcacgaagaaggctttcagtcgatggtcgagcaggccgttgagcgtggactgagtgcagagtctgtgactcgtatctacgaagagtacgaagccgatggcatctctgagaaatcctatgcggaactcgaagctgctggatatagccgtgcctttgtggactcctacatctccggtcaggaagcccttgtagaccagtacgtcaatcaggtggttgcctttgctggtggtaaggagcgctttagcgcaatctatacgcaccttgaagcgaccaacccggctgcggctgagtcccttgagactgccatgatgaaccgagacttggcgactgtcaaagcaattatcaatctggctggtgagagttacacgaagaaattcggtaagccagccaaccgtagtgttaccaagcgtgctactccggttaaacctgtagctcgtcagaaagagggctttacgaatcaggctgagatgattaaagctatgagtgacccgcgttaccgtagtgatgctgcctaccgtcaaatggtagaacagaaggttatcgactccagtttctaattaaccctcactaaagggagagaccatagatgactacaatggttgaatcacctgagcacagaactttgtggacgctcccgtaggtgaaacattgagaaccaactcgattcaagtagtaaccaaacttttctttaaattaacataaggagattcaacatggctaacattcaaggcggacagcaaattggtactaatcagggtaagggtcagtccgcagcggacaaattggcgctgttcctgaaagtgttcggcggtgaagtcctgactgctttcgctcgcacctccgtgaccatgcctcgtcacatgctgcgctctattgcttctggtaagtccgcacagttccctgtgattggtcgcaccaaagccgcttacctgaaaccgggtgagaacctcgatgacaaacgtaaggatatcaaacacaccgagaaggtaatcaacattgatggactgctgactgcggacgtgctgatttacgacattgaggacgcgatgaaccactatgacgttcgcgctgagtacaccgcacagttgggtgaatctctggcgatggcggctgacggtgctgtgctggctgaactggctggtctggttaacctgcctgacgactccaatgagaacatcgagggtctcggtaagcctaccgtactgactctggttaagcctaagactggcgacctgactgacccggttgagctgggtaaagcgattatcgctcagttgactatcgctcgtgcgtccctgaccaagaactacgttccggctgctgaccgtaccttctacaccactcctgataactactctgcgattctggccgctctgatgccgaacgctgcaaactatcaggcactgattgaccctgagcgcggtactatccgtaacgtgatgggcttcgaagtggttgaggttccgcacctgaccgctggtggtgctggtgatacccgtgaggatgccccggctgaccagaagcacgctttcccggctacttccagcgctaccattaaggttgctctggataacgttgtgggcctgttccagcaccgctctgcggttggtacggtcaagctgaaagacttggctctggagcgcgctcgtcgtgcgaactatcaggctgaccagattatcgctaagtatgcgatgggtcacggcggtctgcgtccagaagctgctggcgctatcgtgctgccaaagacttcgaaggcttaatggtagcgcctttgagtatgaacgcggagagtgaagtggagccgacccaagaggtagccgccgaagtagctctcacgcctcaacagaaggccgccattactcgtgctcgtaacaaggcacttaagtctcaataacaacaagcaaaccccttgggttccctctttgggagtctgaggggttttttgctttaaaccctcactaacaggaggtaacatcatgcgctcttatgagatgaacattgagaccgcagaagagctatcagccgtcaacgacattctggcttccatcggtgagccaccagtatcaacccttgagggtgatgcgaatgctgacgttgcgaatgctcgacgtgtactcaataagattaaccgacagattcaatcacgaggatggacattcaatattgaggaaggtgtgactcttctaccggatgcgttctctggtatgattccatttagctctgactatctgtccgtaatggcaaccagcggtcagacccaatatatcaaccgtggtggctatctctatgaccgctctgcgaagactgacagatttccttctggtgttcaggtcaacctgattcgtctgagagagttcgatgagatgcctgagtgcttccgtaactacatcgtcaccaaggcttcacgccagttcaacaaccgattcttcggtgcgccggaggtagacggagtgttgcaggaagaagaacaggaagcgtggcgtgcgtgcttcgagtacgagttagactacggcaactacaacatgcttgatggcgatagtttcgttcagggtctattgacgcgttaatagtaaggaggcacttatgccagcacatagaaaagaaataatcaacgggtgtaaagagtgctctaagtgcctcacagttaaaccgttggaagagtttggtaagtcgagcagaccgggtggtcaatcccaatgcaaagagtgccgtcagtcaggtaagcgcggcaggcctgtaagccccacacaacgtgagtctcaccgggcgtgggtgttgctgaacacctatgggataaccgttgatgattttaacaaaatgcttgaggatcaagcgggtgtttgtaagatatgcggtaagggcccttctggtcgattcaagcacctgtgcgtagaccactgccacacaactggacaggtgagaggactactatgccacgcctgtaacaagtcattagggttccttgaggatgaccctgataggattaaacgtctaatagcttatttaggaggtacacaatgtcactaattagccagtcgattaagaacctcaagggcggtatcagccaacagccagatattctccggttcgctgaacaatgtagcgtacagattaacggttggtcttctgagtccgagggtctccagaagcgcccaccgatgattcaccttaagacccttggcgctgctgggtatgtgggtgcgcaaccttacgtgcatcttatcaaccgcgatgagttcgagcagtatttcgcggtgttcactggtgaagacattaaggtgttcgacctcgatggtaaggagtaccaagtacgtggagaccgctcttatgtacgaacagccaacccacgggaagaccttcggatggtaacggtggctgactatacctttgttactaaccgcaaggtggttgtgcagagtaacgaccaatcggtcaaccttccgggctttaaagaccaaggtgatgcgctgattaatgttcgtggtgggcaatatgggcgtagactctcaatcgagttcaacggggctgagcgtgctgctattcaactaccagacggctcacaaccagcacacgtcaatgaggttgacggtcaggccatcgctgagaagctggcggctcagttgcggaataacctaggtaacccaaacaatgaacaaaacccaaataagtggcgcttcaacgttggccccggattcatccatatccttgcgccaaataacgataacgtttggggactacagactaaggatggttacgcagaccagctaatcaaccctgtaacccactacgctcagtcgttccagaagttgcctattaatgctccagatgggtacattgtgaagattgtaggtgacacctcaaagactgccgaccagtattacgttaggttcgacctcaaccgtaaggtgtgggtagaaacaatcggctggaacacaaggacttacctgcactaccacacgatgccttgggcgctggtacgtgcttctgacgggaactttgacttcaagtaccttgagtggggtgctcgtactgttggagatgatacaactaacccatacccatcgtttaccggacagacaatcaatgatattttcttcttccgtaaccgtttaggcttccttagtggggagaacatcatcttgtctcgcacctcgaaatacttcaacttcttcccggcctccgtgtcaaactactccgacgatgacccaatcgacgttgcggttagccacaaccgggtgtcaaccttgaagtatgccgttccgttctcagaagagttactcctatggtctgaccaagcgcagttcgttctgacagcttctggtatcctttcgagtcgctccgtagagttgaaccttacgactcagttcgacgtgcaagacagggcacgcccacatggtgtaggacgtaatgtatactttgcatcacctcgcgcttccttcacatccattaaccgatactatgcggtacaggatgtaagctctgtgaagaacgcagaggacatgacggctcacgttccgaactacataccgaatggggtattcagtatatcgggtacaaccgctgagaacttcgcggctatccttacgagcggagcaccgaaccgggtgtatatctacaagttcctctatattgatgaagaaatcaggcagcagtcgtggtctcattgggactttggggacaacgttacggtgtttgcagcacaggtgataaactcaacaatgactgtattgatgagcaatgaacatgctgtgtggatgggacgcttgcacttcacgaagaactccatagacattccgggagagccttacagattatacatcgacgctaagaggaaatacaccatccctgccgggacgtataatgatgatacctaccagacgtccataagcctcgcagcgatttatgggatgaacttcactaagggtaaagtgtctgtggtcttccctgatggaaagattatagaggtagacccgccaatcaacggttggagcagtgacccggtgttacgacttgatgggaaccaagagggccaagtggtttacattgggttcaacatcccgttcacttatacgttctcgaagttcctcattaagaagactgctgaggacggctcgacggctaccgaggatattggtcgcttacagcttcggcgtgcgtgggtaaactatgaggactctggagcgttcaccatccgtgtgaacaacctgtcccgtgagttcatctacacaatggctggcgctcgtttgggttctgacaatctgcgtgttggtaggtcgaacattggcacagggcagtaccgcttcccggttgttggaaacgctcagacgaacatagtaactatcgagtcagatgcgtcaactccactgaacatcattgggtgcggctgggagggtaactaccttcgtcgttcttcgggcatttaacttaaagtctccctgcggcgaattaaccctcactaaagggagacactaatagatacgaggggttaaagcattatgtacattacaaagtgtttacaaatccatgccgacaactttcagccgtccatagaggacattctggaagctgaggcactaggtgttgaaccaaaggtaattcctgatgagaacactgtggcaatgcttagcgataacgctgtgttggcaattggtggcaatcagggagaccgagtgtggttccttacctctaagtacgtcccactgtttaacttaaaggagcgcttagagtttcgcaagttaatagtcgaatatcgtgatacgatgctgaaccagtacgagtccatttggaacttcgtatgggtaggcaataagtcacacattcgtttcctaaagacaatcggagcggtattccacaacgagtacactctcgatggtcagttccaactattcacaatctcaaggaggcagcgtgaagagatgtaagaaatgcggagaacttaaggctgtctccgagttctataaggacaagaagagtaaggacggcctacggagtcactgtaagccctgtcactacgtgtattacaagaaggactactcaaaggcgcgagagtttaaccttaagcgactgtacggaattactctggaagaatatgaagcgatgctccttaagcaagatggagtgtgcgctatctgcggtcttaccgagagagttgagggacgggcgttagcggttgaccattgccacgccactggcgctgttcgtggtctcctttgctctgcctgtaacatcgctcttgggaagttcgaggacgacaccgagcgtcttcggaaggcaataacatacctaggagggaattgattatgtgttggatggcagcaatcccaatcgccatgatgggtgcccaagctctaagtagccagaacagtgctgacaaggcacgagtggcacagacagaagctggacgccgacaggcaatggagatggtcaaagagatgaatatccaaaatgccaacgcctcgctggaacaacgggacgcccttgaagctgcatcctctgagttgacttcacgtaacatgcagaaggtacaagctatgggaaccatccgtgcagctatcggcgagagtatgctagaaggcgaatccatgaagcgcatcaagcgtatcgaagagggcaactacattcgggaggcaaacagtgtcaccgagaattaccgccgagactacgctagtatctttgcgcaacaattgggacgcactcagtccacagcaagtcaagtagatgcagtgtacaagagcgaggccaagggtaagtctggtctgatgcgtgtactagaccctctgtccattatgggtcaggaagctgcaagtcaatatgcggctggtggatttgacaagaaaggcggcaaccaagcagcacctatcagtgccgccaaaggaaccaagaccgggaggtaataatggctagtaaactaaatagtgttttaggcaatatggcgactcccggtatggaacgactccggggcgtcaaaggtatggactaccgggcagcaaccattcaggctgaacaaccaagggcgagtcttctggactccattagtcgattcgctaaggctggtgccgatatgtatatggcgaaagatgaacgtgataagcaacgagccgatgagcgctccaacgagattatccgtaagctgacccctgagcagcgccgacaggctatccagaatggtacactgctgtatcaggatgacccatacgcaatgcaagccttgaagttcaagacagggcgtaacgctgcgttcctcgttgacgatgaggttcaacaggccatcaaagagggtcgcttccgtactcgtgaagagatggagcagtatcgtcactcacgcctacaggaacagtcgaagtcgttcgctgagcagttcggcatcaatgagatggatgaggagtaccagaagggtttcaatgcgaacatcaccgagcgtaacattgctctgtatggcgcacatgataccttcctgagtgaccaagcgcagaagggtgctatcctgaactcgaaggttgaactcaacggtgtcctgtctgaccctgacctactgtctcgtcctgagtccggtgagttcttccagaactacattgacaactccttggtgacagggatgaccgacaatcaggctcagcaggttatctcttcgtccttgaatgacgtgctacagcgtccgggtggtgccgccttcttgcagaacattgagaaccgcaaggtaactcttaatggcgctacgactacctatcgtgaactgatgggtgatgaacagtggcaggccatgatgattaaggcacagcacactcaattccagaacgacgcgaagttgactgagaggttccaactgagtatcaactctgcgcttaaccaagaggatactggcaagggatgggaggcgctccaaggtatcaaggcggaactcgacaagattcagcctggagaagaacttacgcctgagcgccagcagctcaatgatgcccaagcgcatatgcagacgcgcttcaaacaagaggccgctgagactgcgaagctgatggacaagcagcgtaagaccctgaataaatctttggtcatcgacaagcagttccagaagagaatcaatggtgagtatgtctcaactgactacaaagatatgccaacaaacgagaacactggagagtttgtccatagtgatatggtgaactacgcgaaccagaagttagcgcagattgacgctatggacattccagaggcgcagaaggatcgcatgaagttgcagtacctccaagctgactctaaagatggtgcattccgcactgctgtaggtcagttggtgtcagatgctcgtggtgagtggaaggcggctgtcatcaatggcgagatgcctgatagcacaccagcccttgactccctacgcaagatgcgcaacattgaccccggattgttcgcagcactgtatcccgacgatgccgagctgtttcacacaatggatcaattggatcgacaggggataaagccgcaagccctcattaacgccaccaaatcccgtcaagggaaaacgcgtgaaatgcagattgaggatgagcgtgcgttcagcgagctgatgaacaactctgagcagcccgaactgaaataccttccggcttccatgcgtgagtacgctcagattatttatgactctgagaagtacctaacaggaaaccctaaggatgccatatcagcggttagttcgttcctaaaggacactacctatacattctcttcggataacgtagatggtggaacctacggtgtaatccctcgcaacatgatgcaggtaacagatgaccctaaatcttgggagcaaggtaaggatatcattgagcaagctgttaagaagtaccaagagcaaaacccttgggttaccaacaaacagcttaaggttagccaacagggtaacttaatcaagatttacgataccactaccaacttgggcataagttatgataacgcactgctacgcaaggtgtataagaactatgctgagcaacaggctgcatcggctgagaagaaagccttaacggaagccaataagcgagcacctatcgtcgcggcaaccaaggcccgtaaagaagcagctaagcgtgtccaagagaaacggaacaaggttcctaagtttatctatggacgtaaagaagactaacagtaaactataaggaggctccatgagctacgacaagacgaaaccatccgagtatgatgggttatttcagaaagcggcagatgaacatggggtctcctatgacctgcttcgtaaattagcattcaacgaatctggcttcaatccgaaagccaaaagccctaccgggccgttgggtatcatgcagttcactaaaggtacggcagcggggcttggactcaaggtgacagggggagatgacgatgagagattcaaccctgagttggctgtggacgcagcagctcgtcacctgagcgacctcgttaggaaatacgacggggatgaacttaaagcggccctagcgtacaaccaaggagagggacgcaatggcgctccacaaatgcaggcttatgaccgaggcgattgggcctctatcagcgaggagggccgcaactacatgcgtaaacttctcgatgttgctaacagcccgcgcaagggagacttggaggcgttcggtgggataaccccaaaggctaaagggattcctgctgaggacgcctttgctggaatcggtaaggccgggaaggtaggaactgagcttccacaatcaactggctttaagctggagggtgtggaacaacaggaacctgccgtaccgttcactaaggatttctacgataaacatggaactaccgttgaggaatatgaaaaccgttcaacattcttcgggataaaggacaccacaagtgccgagcttcataactcgctattgggtgttgccttcaatgctgcgcgttttgatgatagttttgacatcttcaaggacgctattaccccaactcgatggaactcctaccagccgacagctgaggatcttgacaagctccgcaacagtgggcttcctccgagttactactcagtggtgacaggtggtgacggtgataactgggatgacctgattaagatggcgaagagaaactacgagatggacgtgaaggctgctgatgctggtgtgggagcacaattggttggcggaatcgtgggagctggtgttgacccattgagctatgtgccgcttgttggtgttgctggaaagggtctcaaggtggtaaacaaggcgttcgttgttggtgcccaaagtgcagccttgggcgcagtttcagaagctgttcgcacatccgttgctggtggtgaggcgcactatcaagatgcaatccttgggggtcttatgttcggggccgggatgagcgcaatagctgatggagtgagtgcagcattgggccgtgttcgcgctggtcaagttagtaacgacttcgaccgcatggctactcgactggaggcgcgtgagtctgcctttcaagctggtggcgaggacttaacacgtatgccaacagagggtcgtacatttgacggggaacatgcgggtgtaaactactctcaacttgaaactgaaccgggggctgtggtgctgccgcaaggtcaaatcttgagtgacaccaacccgattaaccctcagacacttcatgagttcgagcaggttaaccctgagcgagcggctcgtggtatctctttgggtggattcgctgagatcagcctcaagacccttcggtcggagaatgagactgtgcgctccattgcgagtgaccttgtgcgttctccgacagggatggaatcaggctctaacggtaagttcggtgcgactgcttctgacattaaggagcggctccacgcgaacaatcagcgcacctacaatcagctttatgatgctgtgcgtactgcaatgaaagaccctgagttctctacaggtggtgtgaagatgagccgtaaggaagtacgtcaggaaatctataagcgtgctgccttagcgattgagagaccagagctacaatcgggactcacaaagggagaacgtaaggtgatggatatcctgaaacaacacttcgacctcaagcgagaactcatggaaaaccctgctatcttcggtaacgccaaagctcgtagcatcttccccggctcacgccataacggaacctacgtgcctaatgtgtatgaccgcgccataaagttgtacatggtgagtcgctacggtaacgagggactacaacgggcaattgcagagtcgtggcttacatcttaccgcgctcgtccagaagtcaaggcgagagtcgatgagtacctgatggagcttaacggtctcaagacggtacaggaagtaacaccagatatggttcagaagcacgctatggacaaggcgtatggtatatcgcacactgaccaattcacttcctcctctatcattgatgaaaaccttgagggtctggttggcatcgagaacaataacttcttggaggcccgtaacatgttcgacagcgacatggctgttaccctcccggatggtagcacgttctctgtgaacgacctgcgtaactacgatatggctgacattcttcctgcttatgaccgtcgagttgacggtgacgtggctatcatgggtggttcgggtaagacgacgaaggaactgaaagatgaaatcatggcgctggacaagcagtctgagggtaacggctcactgaaaggtgaagtcgaagcactcaaggacaccgtgaagattctgactggtcgtgcccgcatgaacccagagggagctttcggtacgattcttcgctccatgactgacttggctttcttcgctaagaacttctatatgccgttccagaacttcactgaggttgctgctatgttgagtaaaggaaacacctctgcggtacttcatggaatcccactgcttaacgattgggttagccggaggaagcctatgagcggctctgagattaaggagattcacagtatggtgttcgggaaggaactagaccagcttatgcgtccggggcgcgaagaccatatccgtcgccttcgggagtctactgacactaacgcagtggtggctaatgtggttgggactattcgcttcggaactcaggaattgtctgcgcgctcaccttggacgatgctgcttaatggaacctctaactacatcatcgatgctgccagacagggtgtactgggtgatgtggctggggcagcgctcgctgggaaaggatctaagttcggtaaagcgaattaccttaagtctgcctctgtgtcacctgagcagtggaagggaataaagcagttgttccgtgaccacgccactcgtgatgctgacggtaagtttacaatccgggacaaacaggctttcgccaatgacccacggactatggacttatggcgtctggctgataaggttgctgatgagactatccttaggccgcataaggtttcctcacaggacgccaaggcttacggagcggctgtcaagatggtgatgcagtttaagaacttcgtaatcaagtctcttaactcgcgcttcgtcagattgttttatgacgcgactaagaacaacagggctatcgattctgcgctgactgcaatcatctctatgggtctggctggtggttactatgttgctcaggtgcacttgaaggcttacggcctacaggagcacaagcgtaaggagtacctaaagaatgctcttgaccctaaaatgattgcccacgcgtcattatccagaagttcacaccttggttccccactgtctgtctatgatatgattggtggcttgttcggtaatgatacctaccagtacacccgctcaacggtgttaccaaaggaaaagaccgaacgtgaccgaaacaaggcttggactggtaaggaggttgcgggtaacatagtaggggcgatatccaaccaagtaccagctgtaggactagttgggaatattgggtctaccgccatgaatgcctctacgctacttagctctgatggtaagcagagtgaggtagagttccgtactggtgtgttcaacgccatgcgtgagcttgtccccaatgacccgctgacacaacagttgattatgcacatcttcgaagagcagggcatcaagattaaggatgatgcaacacgccctcgccaataaaccctcactaaagggagagaggtcacattctggcctcttctctcttaatgctaatttacaaaggaggtcacatggctacaaatattaagaccgtgatgacttacccgctggatggctccactacggacttcaatattccgtttgagtatctggcgcgtaagttcgtcagagtgacacttatcggtgttgaccgaaaggaactcatcttgaatcaagactatcgttttgcaactaagaccacaatctccacaacgagagcattggggccagcggacggttataacatgattgaaatccgtcgatttacctccgctaccgataggctggttgacttcaccgatggttcaatccttcgggcatacgacctgaacatctctcaggttcaaacccttcacgttgcagaagaggctcgtgacttaacggctgataccattggtgtgaacaatgatggcaaccttgatgctcgtggtcgtcgtatcataaacgtagctgatggtgttgacctcggtgatgttatcactttaggtcaagtcactcggtggaacgagtctgccctgaactctaagaacgccgctgctacctctcaggccgctgccaagacctcagagaccaacgctaagacctcagagaccaacgctaagacctctgagaccaacgcgtaccaatgggcgcagcgtgctgaggactctccggtacagggtagcgagttctctgcgtatcattactccctcaagtccgcaaaaagtgcaacagccgcgcatacgtctgaggtcaacgctaagacctctgagaccaacgctaagtcctctgagactaacgctaagacctctgagactaacgctgcatcgagtgctgctaaggcttctgaggaggctgctaagctgactaacatgaatgactttgctgccgctattgattcagtcaacggtaacaatgttgtcatgaagggtgacttcaccattaaaggaaacggtaaagtatcaatactgaaccacagtgggctataccaagataagaccgttaatggcgtgaactatgccaacaggatttatatggatgatgcaggggccatgcacttcgagaactaccgtgtgtctggtgcttcatccaccttacgtgctggttttgttattacagataccaacaggtttgactttacagggccaacgcgagttaatggtgaatctaccgtatatgtgtatgcgccccctaatccggctattggtcaatacctcaatgctgtggcagttcgctcacagcttcggggccgtggtggtaatggtgatccacttggtgcgtactgtggtatgtatattcaggagcacgttggtacagaccacgcgataatccttaacctcaatggttatagcaaggatactaactggcagctattctccaatggtaaaatatctacaccacttggtgatgtgatgacttcaggttctgatgttagaatcaaggatgatatcactaaacctcttgatggtgctggtgagcgtattgacgcaattggcatagtggaatacacagagattgccaccggggaacgtaaacgtgggtggctggcccaacaacttgacacgattgacccgctgtacacatacctaacgaccaccgcagaaggtagtcttttgaataccaacgacagggcgttgcttgctgacgtaataactgagcttcaagcactgcgtcaacgcgttaaagaactcgaaggacaatcaacaaagccagcggacggcacaacataaggagaacacaatgctttcttttgacttcaataacgaggtcgttaaggctgcgccgattgttggcacaggggtcgctgatggtgcggcccgactcttttggggactatcgttaaacgaatggttctacgttgcagccatcgcctacacagtggttcagattggtgccaaggtagtcgataagattattgactggaaacgtgcaaataaggagtaacctatgagcgacaagactttaatcaagctgctggagatgctggacacggagatggcacagcgtatgcttgctgacctccagagcgaggaacgccgaacgccgcagctttacaacgcaatcggcaaactgttagaccgccataagttccaaatcagtaagctgaccccggatgagaacatccttggcggtctcgcggctggtctggaagactacaacaaagtggtcggccctaatggtctgactgacgatgagaccatcacgctacagtaagtgacatactcaaggttctccacgtggggagcctttatggatgttatttggtgcatctgtgtgaaatctgaaaattgatgggaggtgttatgctaaaacttttacgcagcgcactcccttgggtactcgccgggacactctttatgggtggctggcacttagggtcaacccatgagagagcaaactggaaggaggtaatccaaaatgaatacattgcgaaaacaaaagcaaccgcagcaactcaggcagaggtcagtcgggtatcccgtgagtaccaagaagagattgcagccattgaaggcagcactgataggatgcttaatgacctgcgtagtaataataagcggctgtcagtccgcatcaaaacccttaccggactgccagaagataacggtagatgcgagtttaatggtcgagccgaactacacgagtcagatgctaagcgtattatcggaataacccaagctgccgatgctcacgtaagagcgctccagcgtactattaaggagatgcagaatgagcgacacccaagcaaaccgtaatgcgctaatcattgcgcagcttaagggtgacttcgtggccttcctgttcgtattgtggaaggctttggctctcccgccgccgactaagtgtcagattgatatggcccggtgtctggctaacggagacaacaagaagtttatcctacaggctttccgtggtattggtaaatcattcatcacctgtgcgttcgttgtgtggacgctatggcgtgaccctcagttgaagatactgattgtctctgcatccaaagaacgtgcggacgctaactccatcttcatcaagaacatcattgacctgctgcccttcttggctgagctaaagcctcgccccggtcagcgtgactctgtgattagtttcgatgttggccctgccaagcctgaccactctccgtctgtgaagtcggtgggcatcactggtcagttgactggtagccgtgctgatatcatcatagcggatgacgttgagattccgtctaactccgcaactcaaggtgcccgtgagaagctgtggactctggtgcaggaatttgctgcgcttctgaaaccgctgccgacttctcgcgttatctaccttggtacgcctcaaaccgaaatgaccttgtacaaggaactcgaagataaccgtgggtacaccacaatcatctggcctgcgctctatccgcgtagccgtgaggaagacttgtactatggcgaccgtctggccccgatgctccgcgaagagttcaacgatgggttcgagatgctccaaggtcaaccgactgaccccgtgcgcttcgatatggaagacctgcgtgagcgtgagttggaatacggtaaggctggcttcactttgcagttcatgctcaacccgaacctgagtgatgccgagaagtaccccttacgcctccgtgacgctatcgtgtgcggtctggacttcgagaaagccccaatgcattaccagtggcttccgaaccgtcagaatcgcaatgaagagctacctaacgtgggccttaagggtgatgatattcatagttatcattcgtgcagccagaacactggacagtaccagcaacgcatcctcgtgattgaccctagtggtcgaggtaaggatgagactggttacgcagtgttgttcaccctgaatggctacatctatctgatggaagctggcgggttccgcgatggttattccgacaagacccttgagtccctcgctaagaaagcgaagcagtggaaggttcagacggtggtcttcgagagtaacttcggggatggtatgtttggtaaggtattcagccctgtgctcctgaaacaccatgcagcctctatggaagagattcgtgctcgtggtatgaaggaactacgcatttgtgatacgctggagcctgtactctctacgcaccgccttgtgattcgtgacgaggtgattcgtgaggactaccagactgcccgtgacgctgatggcaagcatgatgttcgctattcgctgttctaccagttgacccgtatggctcgtgagaagggcgctgtggcccacgatgaccgacttgatgcattagcattgggtgtggagttcttacgctctacgatggaactggacgccgtgaaggtggaagctgaggtgcttgaggcgttcttagaggaacacatggagcacccaatccattcggctggtcatgtagttaccgctatggttgacgggatggaactctattgggaggatgacgatgcgaatagcaacaggttcattgactggtagttatgcatattgagtgcataaggaagcatcgagaccacggatggtcactttaagaaactccttaagaatcaatgagtttgaattaaccctcactaaagggagagaggggacttaaagctactatataggttagtcattcaggttatgcaatgaccttttatgcactttaagtctacctctgtgattggtgatattatcattatataatcacctaccttagagcaactgaaaggaggtggctcaatgttacgcttgctgattgccctgctgcgtcatagagtcacttggcgatttcttctggtacttactgctacccttgggtacgcaggccttactgaccacctcggtcaactggaagtggccttttgctctatactctcttgtggggattaaattattgttgatgacagacaagcggctctgagggattcgtaggtatagtttcactacaccaactcatccctgtagagtcaaccctaaaggttatacctaaagatgccctgtagttcgtaatggtcttacagggtcttctggtgtctcctagctatcccttctggatgcgcctatggtctcacctatggtgtggccttacctaaagtggttgcctaaagagaccctttaagaatttaccacaaaaatctgaatgggtatctcacagttcaagaaaccaaagtacccccatagccctcctaaagccacctaaagccagccctacccctagggtttaaccttcggttaaccttgggtatctcctcaagtggcctataggatagcctaaagtgttgcataaagtcaatacctaaagaggcggatggcttaaagaggccttgaagagtgtcctagtgtaccagttcgatagtacatctctctttgtgtccct

SEQ ID NO: 23 - DNA, 40420 bp, Unknown
  source: /note="Description of Unknown: KP2W-P0103 Bacteriophage sequence"
atctgttatcctcctaaagtaaaccctaaagccatcacctaaagccaccacctaaagaccagacctaaagccatcacctaaagagcagacctaaagccaacctaaagccaccacctaaagaccagacctaaagccaccacctaaagaccagacctaaagccaccacctaaagaccagacctaaagccatcacctaaagagtgccgctatcttaaagacaaccagaccgatagacccattgttaacctgtagtgatgccttgtagttatctgtagtcatttcataaaccctcactaaagggaataagggatacttaaagagggaataagggatttaataaaaagatttaatttaatggttgactttaagtaacccttaaggctattattcatcacgtcaacgggacaacggccttaaagccactccctgagatactggagtcaaccggataagtagacagcctgataagtcatacgaaaaacaggcattgacaacatgaagtaacatgcagtaagatgtaccacataacgttaaccaccgctctggtgtcttctaggtgacttaagcgcaccacggcacataaagcgaaacaaaaatggttgacaacatgaagtaaacacggtacgatgtaccacatgaaagacaccgagtgtcgtaggtgtaaaaacgcgacatagtggatagatggcgaaagcacaagcgaccacgataataaagagcttgtcgcacttataacgcaagtgacggctaacactgaaatagcctcggctcaacgaaactgtagcctaaagttctttaacaatctggataatagctcttgagtgtaccgatgtataagcgaataactcaaggtcgcactgaaagcgtggcctttatgatattcacttaacacgaactaacatgaggtaacaccaaatgattttcactaaagagcctgctaacgtcttctatgtactggtgtcagcattccgttctaaccttgatgatgaggtgaacatgagtcgccaccgccacatggtgagcgaattacgtgccgcaccgggtatctacggcgagcttgagtctaccgatttgaccgggtgctatcgtgagagtatcgcactggctccaaccgaggaaaagaccatgcgtgtactctgcaagaacaaagagcaggcactacaggtagctcgcttagcttgcaatgagtatgagcaagattgcgtactggtatacaaatcacagactcacacagcgggattggtgtacgctaaaggtatcgacgggtataaggctgaacgcctgccgggtagcttccaagaggttcctaaaggcgcaccactgaaagggtgctttacgattgacgagttcggccgccgctggcaagtacagtaagtgatagactcaaggtcatgcacgatgcgtggcctttatgattatcactttttgactatgaaggaatcacaccatgcgcttaaataaagacacagcggtagctatgcggtcagcaatcgaatcaagagccgcacacaacgtgggagggattgctgatgttgcacgggtttataaggagaaagggcttacattccgcagattcatgtgggactgttatcatgcagtgggctttaaagagactacaagaatcatcgcagagcacaacacggtgacagttatcggcgggcacataacagatatcaatgattcgcacatcgaaactatgctcaaggttgcactgaaagacatagcttattagtaattaactacaggtcgttagctcgtagcggcctgaatgataattactaaacaaacctgagaggatatgactatgaaacaatacgccatccttattcccggctggtgctactcaatgacctgctacgggtacaacgaaagggacgctcgtgccagattcagggatcaacaaggcttcggcaagcgtttacctaatggtacggctgtatgggaggttatgtaatgagtaagttactggcaacctctaaaatcaaaggccaatgcactgtaacgctgcgtgagtattaccacgggtcaatgggatgcacctatgttgtgcgatacggtaaacaggtcacgcactgggtaaaccttgttttggcacaagaggagtaccaagcctgtgtgatacaccaagcaacatgtgcaggctggaacgactgacaacagacttcaagtctatcaggtggtaaactcaaggtcgctccatgcgagtggcctttatgattaacattacgatagaggatgagagtatgggatacgaagacacgaagaacctgataattctctgtatagcaatacccgctgcaatcaactttgtgtacgaggtatggattaagaaatgattatcgcactaatcgcactggtctatctgtgcatcgctatgtactttatgcgagactttaagcgcggtctggcaatacacaaggcaacgctgagttactttaagtggggattcatcccacggtttacggttcgtgaacgtaacggacgctttaaggccaacaaggtgggagtattctacattgctacgcactaactcaaaacacgtaaagattgcactgtatgcgatggcttatggtgcatcgaaacgcaaggtcaaacgcatcttaacgagacaccgcaagatgaccgcacgacaggctgcaagcgctgtcaaatgggctgaatttactctttactcttcttacagataacaggacactgaacaatgactttcaccgaagcacaagccgcactcgaagctatccgcaacctgccgattgaccgcttggatgaacgccagcccatgctggtggctcttgcggctgctatcgtgaacgatgagactcaagacggcgaactgacgcaggccaaaggcaattggggcttggagtctatggactactggcagacactggctgagcgtatgcgtgatgttggatttgtacgcttgggtaacggtcactttagcgcagcatacgagcacgcattgttaccgggcaaggttatcaaggtaggctttaagaaagaggactcaggcgctgcctatgctgccttctgccgcatgaatcagggtcgtgagggtatccctacggtgtacgacattcagcgtcatacaggctgctacacggtggtcttggactatctgacaccgcttaacgattggtgctacggtgaaagcgataagattcgtcaccactttcaggccgcacgggaaatcattgaggaggattgcttcgataccgccgaagagtacccgataagtgacgggttcattgagacctgcaaggatatccgcaagttcttcctaggcattgcatcgttcgattgtcacagcggtaacatgatgaaagaccaaatgggccgattgattatcacagacccggtatcgttcagcgcagacaacaagttaaagccgggtgagtttcactgtgacccggatgaactaatcgctgagattgaggcgctgagggcgcaggaagcgattgaccgctgtaaggcacgcaaggcacgccgtgaccctaaaggagactttcaggcagcacgtaaagcccgtgccaaatggcgcagaaaggcctctaagcgtgctaaacgtgacgctaaggtaatcgctaagatgcgcatggatgacaacgagcaacgcagggccgagccgagggcgcgcatgttgtggggcgataagcactggcgtaacgcttgggtgcagcacatgaatgttgacttcgcacggctcgaactgttagcagccgcacagatggcacagatagaccacaaggctatcgtatggggcaagccgttacacatagacgcataccttgacaagagactgcaaggttgatagagtcttttcttacaggtcatcatgaggtggcctgaataggaacgatttatccatagtgaggcaagcaatgaacatcatcgaaactatcgaaaagaatgacttctctgaaatcgaactggctgctatcccgttcaacacgctggcagaccactacggcagcgcactggctcgtgaacaactggctttagagcacgagtcttatgagttaggtgagcgccgcttcctcaagatgctggagcgtcaagcgaaagctggtgagattgcagacaacgcagccgctaagccgttactcgctacgcttctccctaagttaaccgcacgcatcgttgagtggctcgaagagtacgcctctaagaaaggccgcaagcctagcgcatacgcgccgctccagttactcaagccggaagcctccgcgtttatcaccctgaaagttatccttgcatcactgaccagcacgaacatgacaaccattcaggccgctgctggtatgttggggaaggccattgaggatgaggcacgtttcgggcgtatccgtgacctcgaagcgaagcacttcaagaagcacgttgaggaacagcttaacaagcgccacgggcaagtctacaagaaagcctttatgcaggtggttgaggcagatatgattggtcgcgggctgctgggaggcgaggcgtggtctagctgggacaaggaaaccacgatgcacgtagggattcgactgattgaaatgctcattgagtccacgggtctggtggaattgcagcgccacaacgcaggtaacgcaggctctgaccatgaggcactgcaactggcccaagagtacgtcgatgtgttagcgaagcgtgcaggagcactggcgggtatctctccgatgttccagccgtgtgtcgtaccgccgaaaccttgggtggcaatcaccgggggcggctattgggctaacggtcgcagacctttggcactcgttcgcactcactctaagaagggactgatgcgctatgaggatgtttacatgccagaagtttacaaggcggtcaacatcgcacagaacaccgcatggaaaatcaacaagaaagttcttgcggttgtcaatgaaattgttaactggaagaattgcccggtagcagacattccatcactggagcgccaagagttaccgcctaagccggacgacattgacaccaacgaggcagcgctcaaggagtggaagaaagccgccgctggtatctaccgcttggacaaggcacgagtgtctcgccgtatcagcttagagttcatgctggagcaggccaacaagtttgcaaacaagaaagcaatctggttcccttacaacatggactggcgcggtcgtgtgtacgctgtgccgatgttcaacccgcaaggcaacgacatgacgaaaggtctgctgaccctcgctaaaggcaagccaatcggtgaggaagggttctactggctgaaaatccacggtgcgaactgtgcgggtgtcgataaggttcctttccctgagcgcatcgcgttcattgagaagcacgtagacgacattctggcttgcgctaaagacccaatcaataacacttggtgggccgagcaggattcacctttctgtttcctcgcgttctgcttcgagtatgcaggagttgcgcaccacggtcttagctacaattgctctctgccgctggcgttcgatgggtcttgctctggtatccagcacttctccgcgatgctacgcgatgaggtaggcggtcgtgcggttaaccttctgccaagcgaaaccgtgcaggacatttacggcatcgttgcacagaaagtaaacgagattctcaaacaggatgcaatcaacggcacgcctaacgagatgattaccgtgaccgacaaggacaccggggaaatctcagagaagctcaagctgggaacctcaacgctggcgcaacagtggctggcatatggtgtaacccgtagcgtaactaaacgttcggtcatgacgctggcttacggttccaaggagttcggctttcgtcaacaggtactggacgacaccattcagcctgcgattgacagcggtaagggcttgatgttcacccaacctaaccaagcggctggctatatggctaagctgatttgggacgcggtgagcgtgaccgtagtcgcagcggttgaggcgatgaactggctcaagtctgccgctaagctgctggctgctgaggtcaaggacaagaagaccaaggagattctgcgccaccgttgcgcggttcactggactacgcctgacggcttcccggtctggcaggaataccgcaagccactccagaagcgtcttgatatgattttcttagggcaattccgtctgcaaccgacgattaataccctcaaggattcaggcattgacgcacacaagcaggagtctggcatcgctcctaactttgttcactcacaggacggtagccacctacgcatgacagtcgtttatgctcacgagaagtatggcattgagtcctttgcgctcatccatgacagctttgggactattccggcagacgctggtaagctctttaaggctgtgcgtgaaacgatggttctcacctacgagaacaacgatgtgctggcagacttctatgaccagtttgcagaccagctacacgagacacaactggacaagatgcctccgcttccgaagaaagggaacctgaacctgcaagacattctcaagtctgactttgcctttgcataacaagcacttagcattaaccctcactaacgggagactacttaaggtctcccactttaagacactttaggtactaagagattaaatttatgattaacattaagactttccttaagaacatctttaagttaaaccgcttgacttccgttaagttctacgcttggatgcccggtagtgatgacctccgcaagactgaatttaagttaggcttaggccgtgcggtaaggtggtcacgaagttggaatgttactcaacggcctccgggatggtcatcttccagaccactgaggacaacgaaatgaaatccttctactacccgaaaggttcaacatgtggtcgtatcgaacgggcatacagttaaccctcactaacgggagagttaaacttaaggtcatcaccagcggtggcctttgtgattaactttcaatacacatcaacatgaggtaagatactatgcgtaccaactttgagaaatttaccaagcgcgattcagtggtcaacgagcatggcgaacagtggcaagagcgccgtgaccgcatgaagaaactccacaagcaacagcgcggtaactcacagaaacgggagtggaactaatgatgggacgtatctatagcggcaacctgaacgattacaaagatgcggtagagcgtctacaggaagaccatgacgtgaccgtgaaggtggagtcattcagttatgaaaacccagcgaagatgtgcaggtcatccggtgaggttctccgtgtgttcacacgctccgggcatctggtggcatccagaaccttcgagcacagcgacagcgatgtacaaatcaacgcgcagactgcacggctccgtaaggttcacagcgatttgaaacactggaagtaataaccctcactaaagggagaacgaaaggaggaaacattatgagaatttcatttgacttaatgagtccttcctttctctcatgggatacgggtcgtcacactggcggctctattcgaaacggctatagaagggttcgttatgaaggtaagtggttaaaccatcacatactcatttgggaacacttcaacggtgcagtcccggagggaatggaagtagaccacattgaccgtaacaaacttaacaacgcgcctagtaaccttagacttgtgacccgctctgagaacaacagaaatcggtcagtacaccggaacaacaagtcaggaatcaaaggtgtctactggcacaaacaccgacaagtttggtacggtcagtgtcgaagaggaaacaaaacatttatcaccgctggttgctccacgaaggaacaggcggcagaacttttagagaaactcaaagaggaaattaattatgatgattttcaaaaccgtcccgtataaggctgtgtcattcgtagagtctgccgttaagaaagcgctggagacctccggctacctaatggctgatatcaaatatgatggtgtgcgcggtaacattgtggttgacaacgtggctgaggccgcatggttgtctcgcgtatccaagttcatcccggcgctggaacacctgaacggtttcgataagcgctggcagcaactactgaacgatgaccgctgcatcttcccggatggcttcatgctggatggtgaactgatggtcaaaggcgtagacttcaacacggggtctggcctactgagaaccaagtggctcaagaagaacaacttcatgtttgaccgtggtggtgttgagccgctgaaaggttccaaagtagcctttgagttggacactaagcgcctgagcgtgcgcctgtatgcggtcatgccgattcacattgcggagtctggcgaggactacgatgtacagaacctgctgatgccgtatcatgtggaagccatgcgcgctcttctggttgaatacttcccggaaatcgagtggcttatcgctgagacctacgaggtctacgatatggattcgctgactgaactgtacgaagagaagcgtgccgaaggtcacgagggtctcattgtgaaagacccacaaggcatctacaagcgaggcaagaagtctggctggtggaagctcaagcctgagtgtgaagctgatggtatcattcagggtgtcaattggggaaccgaaggtttagccaacgagggcaaagtgattggctttagtgtgcttcttgagactggtcgtttagtagacgccaacaacatctctcgcgcactgatggacgagttcacagccaacgttaaagcccacggtgaagacttctacaacgggtgggcctgtcaggtcaactatatggaagagaccccggacggctccctgcgtcaccctagcttcgagaagttccgaggcactgaggacaaccctcaagagaaaatgtaaccaactcactggctcaccttaacgggtgggcctttcttcgttctagggaattaaccctcactaacaggagacacaccatgtggcttatcctattcgctatcgtcgcaacgcttggattaatggctgccgacgacaacatttggcctgattgttaaggagacaacatcatgcgtttacacttcaacacatcaaatggtatcttttcggttcgccgtgaagaccgctctacagcagtggcctctgagcgcaacgccaagctgccgctgattggttcggtcgtcccattgtcgccgcgtgttcacctactgatcactcgtggagagttcattaaggcgatgaacaaagagcgcccgcatctggaagccgtggtcacttactggcctcgcatccgtctgttcgttaagtggattaaggaggttctgtaatgctacaacatcattggaacaaaccagacttagaggctcgcttcccggttaactctgctgtgcgatactccggcgacttcctcaagcgcttcttaggcatgagcggagtggtcactggtcactcgaacacaggtcgcgttaaggttcgcttcggtaatcagcacgctgagtttcttcctgacaacctgattccgctgcctaaagctgacgttaagactccgaacgtggaagcaccgaaggcagaattcaagtctgacgtgacccacccgaaccattacatgctgttcgacaacgtggaagccattgaggttatcgcccggtcaatgaccgtcgaggcgttccgtgggtactgccttgggaatattttgaagtaccgcctgcgtgctggcaagaaatctgaactggcaactatggagaaagaccttaagaaagcggctttctatcaggaactgtttgataaacataaggggctgtgttatgacgcttcgtgaatgctgcgattggtgtgccgctaagtggaaccaagctattgaggatggtgataaggcggctgctgacgcttaccaacaattgtacgcgctgtgggagcggcgctttaaggaggctcaaagtggagcaacgtgaacagaaatacctcctgacgatagaaggcaacaccgagtcctttgaggttccggtattcgcccggtctctcgaagaggcaacgctacaggctgaacattatgaggacgctgggttcgtagtgactcgcatccgtccagaagtgaaagcctaattaccctcactaaagggaacaacccaatcattaaccacaaaggagaaacattatggctggtttcaagaagaaaatctacacctctggtcttggcactgctgagccttatgcttacctgagtaagccggattatggcaacgaagagcgtggcttcggcaaccctcgtggtatctataaggtagacctgactctttccaataaagacccgcgctgtcaggcaatggtcgatgaaatcgtgaagactcacgaagaggcttatgctgctgccgtggaagagttcgaggctaaccctccgcaggcacagcgtggtaagaaaccgctgaaaccttacgagggcgacatgccgttcttcgataacggtgacggtacgactaccttcaagttcaaatgctatgcgtctttccaagacaagaagaccaaagagaccaaacacatcaatctggtagtggtcgatagcaaaggtaagaagattcaggacgttccgattatcggtggtggctctaagctgaaagtgaaatactctctggtgccttacaaatggaacaccgctgtgggcgcaagcgtcaagctgcaacttgagtccgtgatgctggtcgaactggctaccttcggtggtggcggtgaagatgagtgggccgatgaagtcgaagacggtggttacactgcgagtgaatcccgtcagtcccgcgatgagcaggagtggcaggaagacgagcacgaagaaaccccggatgaggatgaggatttttaaatggaacttaaagagaaactaaaggcttacagcgaagtttctcataacgggtgctgggagtggcaacgctaccggatgccctgtggttacggtaggattagacacggaggccgaatggaactaacgcatcgtctatcctacctagcattcaacggggatatacctgagggtcttgttgttcgccataagtgtgacaacaaatgctgcgttaaccctgagcaccttacgctaggtactcaaaaggacaacgttaaggatgcaatagaccgtggtcaattcgtctacagggagaacccgaaaggcgcaaagcaccacatggctaaacttaatgagaaacaggttatggaggtttacaactcgacacagacccaaagcagcctagcagagacctatggtgtatctcgacaattaatcagcgcgattaagagaggtaaactatggcagcacgttacgcagcacgtggagttaaacgagtagggtcatatagaagcggcttagagcagaagaacatggagatgctggaacgtaagggaatcaagggacagtatgaaatgtggtctattccctatgttgtccctgcatcgaaccacaagtacacaccagacataatcctacccaacggaatcattattgagaccaagggtctatgggatagtgaagaccgtaagaaacacttactgattcgtgagcagatgcctgagttggacattcgtttggtattctcttcgagccgctctaagttatacaaagggtctccaaccagttacggtgagtgggccgaaaagcatggtattctatttgctgacaagctgattcctgtggagtggcttaaagaacctaagaaggagataccgtgggataaactaattgcaaagaaaggagttaagaaataatggctaaggtacaattcaaaacgcgcgcttctacggaagcaatctttgtgcactgtagtgcaaccaagccaagccagaacattggcgttcgtgagattcgtcagtggcacaaagagcagggctggttagacgtaggatatcacttcatcatcaagcgtgatggcactgtggaagcaggccgcgatgaactggctgtaggttcccacgttaaagattacaaccacaactccgtaggcgtatgcctcgttggtgggattgatgataaaggcaagttcgacgccaactttacacctgcgcaaatgcaagcgctgcgtagtctactggtcacgctgctggcgaagtatgagggttcagtccttcgtgctcaccatgacgttgcacccaaagcctgcccgtccttcgacttgaagcgctggtgggagaagaacgaactggttacatctgaccgagggtgatgccatgaggatgatttgtattcgctgtgataaaccgttgaagagtcgtgtaccgtcacgtcagtgtcagtgcaaagacccaatcaaggcggaggaacacaccgaggaataattaacactcactaaagggagacttaacggtttccctttgttctcgcaactgattaaggaatgtacaatggaacgagaagacgatagtatctttctgtttcatgctccatgtgaaaactgtgggtcttctgatggtaactctgtgtactctgacgggcatgaatggtgcttcgtgtgtgaacatcgagtacccgcaaacaaagagcgtgaagcaaagttatcaacgagaagacgcacaggaggcagtaagcctatgagctatgacgtatggaatttcggcgacagcaacggtcgatactctgacctgactgcccgtggcatctcgaaggagacatgccaaaaggctggctactggctggcgaaagtggacaaccgaatgtatcaggttgccgactaccgagaccagaatggctccatcgtgtcgcagaaggtgcgcgataaggacaagaactttaagaccaccggaagccacaagagcgatgcattgttcttgaagcacctctggtctggcggtaagaaaattgtggtcacggagggcgaaattgatgcgctcactgtgatggaactccaagactgtaagtacccggtcgtatcattgggtcacggtgcctctgctgctaagaagacatgcgccgctaactatgaatactttgaccagttcgagcagattatcttgatgttcgatatggatgatgcaggccgtaaggcagttgaagaggccgcacaggttctcccggctggcaaggttcgtgttgccgtgttaccgtgtaaggacgccaatgagtgtcacatcatgggtgaagacaaagcaatcttggagcagatctggaacgcgaacccttgggtgcctgacggtgttgtttccgcgttatcactcaaagaccgcgttaaggaagctatgacctccgagtacgctgtaggtttattatttgatggctgtcaaggcctgaacgatagaaccttgggtgcccgtggaggcgaagtcatcatggtcacttccggttcaggtatgggtaagtcaacgttcgttcgtcaacaggctctgacttggggcaagcgaatgggtaaacgtgttggcctagcgatgctggaggaatccgttgaggataccattcaggacatgatgggcttgaacaataaggttcgtctgcgtcagtctgatgaagtcaagaaggctatcgcggaggacggacgtttcgatgaatggtatgatgaactatttggagacgatacgttccacctttatgactcctttgcggaggccgaagctgacaggctgttagcaaagctggcctacatgcgaacaggcttagggtgtgatgttatagtgctagaccacatctcaatcgtcgtgtctgcctctgaggaatcggatgagcgtaagatgattgaccgcctcatgactaagctaaaagggttcgctaagtcaactggtgttgtgctcgtagtgatttgtcacttgaagaacccggagaaggggaaagcgcatgaagaaggacgcgctgtgtctattactgacctacgtggtagcggtgccttgcgtcagttatctgatactatcatcgccttggagcgtaaccagcaaggtgatatgcctaacttggtgttggttcgcctgcttaagtgtcgtttcactggcgacactggaattgctggatacatggagtacaacagagaaaccgggtggcttgaaccgtctagctacactggcgaagaaggagaaggagatactggctggactgaacaagacggacagtcagacttctaaaggatgcccgtgtgggcattccgattgcgatggaatcatgtaccactaattaaccctcactaacgggaacaacctcaaaccataggagacacaccatgtttaaattcattaacactttaggcaagctggtagtaaaactgtacttcatcgaagccaagaagctggacaagaaggccaaagctgattcacagcgagccattgagttggcgaaacagtcccgcgagaaatccgatgcggctgttagtggcatccacaagtcggcagcgattgcagccaaagcacagtccatgagcaaattctttgagtaaggatcgaacactatgagcaagtcaatcactcacgcaaacaccatccgtctgccagacaccgccgaccagttctcccgccgagtacacatcaatgtgcgcggcgagaaggtcacgatggtctaccgctggaaagaccacaagtctccgaaagcacacactcaacgaatgaccttggatgacaagcaggtcggtcgcttgatgggtgcccttactatggctgctgacaaggtggtcggtgataaccgtgagcgtctggtagagttcggcgctggtatgcaagagattatcgagaagtgataaactcaaggtcgcccaagggtggcctttatgattatcatttagcacgaaaccaaaggagggcattatgctcgtaagtgacattgaggccaacaacctcttagagaaagtcaccaagtttcactgtggcgttatctatgactaccgtgatggtgagtatcatagttatcgtccgggcgacttcggggcgtatctggatgcgctggaagccgaggtgaagcgaggtgggcttattgttttccataacggtcacaagtatgacgttccggctttagagaaactcgcaaagctgcaactcaatcgtgacttcaagttaccccgtgagaattgtattgacacattggtactctcgcgtttacttcatgcgaaccttaaagacacagacatggggcttcttcgttccgggaaactacccggtcgtcgcttcgggtctcacgctctggaggcatggggttatcgcttgggcgagatgaaaggtgaatacaaggacgacttcaaggctatgctggaagagcagggcgaagagtatgttgatggtgctgagtgggtttcgttcaacgagccgatgatggcgtataacgttcaagacgttgttgtcactgtcaagctcttagagaaattccttacagacctccactacttccctgctggtatggacttcacgaagtacgatgcggatttattctggcgtgaagctggcgagtctgtggatattgaacatcgtgcagcgtggctgttagcgaagcaggagcgtaacggcttcccgttcaacacacaggccattgaggaactttatgtagaactggcagcgaaacgcgccgaacttctgcgaaagttaaccgaaacgtttggctcgtggtatcaaccgaaaggtggtaaggaactcttcaagcacccacgtacaggcaagccactgccgagttatcctcgcgtggtctatccgaaacagggtagcgtgtacaagaagcctcgtaataaggcacagcgcgaaggtcttgaaccttgcgacttggacacgagggactacatggagggtgctccgtatactccggtagagttcgttacgttcaagccaagtagccgtgaccacattcagaagaaactacaggaggccggatgggttcctgagaagttcaccgagaagggtgcgcctgtggtggacgatgaggtcttggagcatgtacgagtagatgaccctgagaagcaggcgtgcattgacttgattaaagagtacctgatgattcagaagcgtatcggtcaggcggcagaaggagacaaagcgtggttacgttatgttcaagatgacggtaagattcatggagccgttaaccctaacggtgcagttactggtcgtgctactcatagtttcccaaaccttgcacaagtacccggcgttcgttctccttacggggagcagtgtcgtagcgcttttggtgctgaacatcatttggatgggattactggcaagccgtgggtgcaagcagggatagacgccagtggcttagagttgcgctgtctggcacacttcatggctcgattcgacaacggagagtatgcgaatgagattctcaacggtgacattcacaccaagaaccagaacgctgcggaactcccaacgcgagacaacgccaagaccttcatttacgggttcctttacggagccggagatgagaagattggtcagattgttggggcagggaaggagcgcgggaaggaactcaagaagaaattcttagagaacaccccggcgattgcagcgctacgagaagctatccaacaatctctcgttaagtcttccgcttggattggcggtgagcagaaagtacagtggaagcgccgttggattaaaggtctggatggtcgcaaggttcacgtcaggtctccacacgcagcgctcaacacattgttgcagtctgctggtgctctgatttgtaagctgtggattatcaagaccgaagagatgctcattgagaaaggcttgaagcatggctgggatggtgactttgcgcagatgggatggattcatgatgaagtccagattgcgtgccgaacagaagagatagccaaggtcgtcgtagaggtagctcaagaagctatgcgctgggttggtgaacattggaacttccgttgtcgcttagacacagaaggtaagattggcccgaactgggcggtttgtcactaaggagtatttatgggaggcgtggctacactaaggttccacaagatgccgaccgggtgtgtagtctgcgtttcacataagcgcaatcacgatggctacttccggtacagtatagggtcgtccagaaagggcgagaagaaatgctttatgtttcaccgctgggtttgggaacgacaccgtgggcctataccagaagggtatgagatagaccacttgtgtctcaaccgtgggtgctgcaacgtagaacacttacagtgcataccgaagcgtgaacacataatcaaaaccaacaaagagcgcagtctcgtaaaggagaaacattatggcaatgaccaaacactttaaagtaaccttcgacgttaccgctgtgattgacagtgaatccgagaagaatctgaacgagttgctggtagacctagctaagaaggccggggctggcgagaagctgaatccgttcaaacaagaactgcttattcaaggtctgacacacgggccggaaggtgctgctgcgttctgtatcaagcaaggtctccgtgagtttatccgcgatggtcacagtgagttaagctctaccgagcagaagctgatgagattctcacctgcaaccgtgcgcgaggtgttcaaatgagtgaatacctgaaagttctggcagctatcaaaggttgccctaagtcctttcagtcgaactatgtgcgaaacaatgcggctctcgtagctgaggccgcttctcgtggacacattagctgtttgactgtgggtggtcgaaatggtggagcatgggaggtcacagcctctggtgtgcgcttcctgaaacgaatgggaggttgcgtatgattatgcctaagagtgacaccgtaacgatgacccgtgatgcgtggaacgatgttagcgcgtatattgataagctggagaaagacctagagttcctgaatgcgcttaaggcgtgtggtgtggataattgggacggatactctgatgcagtcgaaatggtttacggggaggatgacgaatgagcctaatcacattgaaagacttcgtggagatgcgtgaaggtaagcctatggagaatggagtgctggtcatggatggtgactggttggtatatcagtcaatggctgctgccgaagttgagacggattggggagatgacatttggactcttgagtgtgaccacgccaaggcacggagcattctcgattctgcaatcgaatcgtaccgaacccgtaagaaggcttggagtgacgctatggttgttctggcgtataccgacgatgtgaactggcgtaaggtactggttgatgagacctataaggagaaccgtaaggcgacccgtaagcctgtgggctaccgtgacttcctgtcgaagttgtgggagcgcgatgagttcattcacatcaaagaggacatgctggaaggtgatgacgttatgggtatcattgggtctggtcacgaggtcttcggcttcaagaaagctgtgttggtctcctgtgataaggacttcaagactatcccggacgttgacttcctgtggtgtaccactggtaacatcttgacgcagaccaaagataccgctgattggtggcatctcttccagaccatcaagggtgatatgactgatggctactcagggattcccggctggggcgatacggcagaagccttcctgaatgacccgttcattgtggagcctgtagagtccgtgttgaagtctggtaagaacaaggggcagacagtaaccaagtgggtgaagcgtgctcctgatgcgactgagacgctgtgggactgcattaaatccattggtgccaaagctgggatgaccgagcaggaaatcatcaagcaaggccagatggctcgcattcttcgcttcgaggaatacaattacattgacaaggagatttacctatggacgccgcaaagctgattaccgtcgctgtgctggtaggtatgctggcgcgaggtctctggatgttcgctctcatagtccgagacgttaatcgagactccgagattaagtgataaactcaaggctctctgtattaaccctcactaaagggaagagggagcctttatgattattactttaagacttaaccttaagaggtgaaattatgttacaaccaattaatcatgttttaactcatcccgatgatattcctagtatgcctcgtgcagctaaagagtatctacaggtgcgcttcaatcaggcctatgtggtggagtccggggagtaccgtgcgctccgcgctgcgggttactctgagtctttcattgctggtgtgatgcatggtctgtaccttgcctctcgaacacttgatgagattgaggtgcgtaaagagcaactgagacaggagtaattatatgtgctggaaaccgaaggtgaaagtccctaagatggacactaaccagattcgcgctgctgaaccagcacctttgactgaacctccgaagtctgtggtatggggaggcgatgatgacgaggacaccagcgtgtcttcctctgaggtgccaacctcaccgagcagcggtaagagcagtctcaaggtaaagctggatgacagcgcagccaagaacaagagtaaatcctccattcgctcaaaggcgtttgggtaactgagtcatagtatagggagaaacatcatgggattcttcaagaaaatcaagaaggctgttaagaaagttgtgaaggaagttagcagaccagtcgagaaggcaggtaaggaagttggtaaggttgttggaggcgcgctgggtgcaggtaagcaggagattatccaacaagaggctccagcaccagtagtagctgcaccgccaccagcacagattgtagacgtacctgaacaggataaggctgagggcgaggatgaggcgcaaaccgagagcgcacgtaagaaggcacgcgctggcggtaagaaagcacttagcgtagctcgcagttccggcggtggaatcaatatctgaggaggactgaatggctgattcaaaacgtacaggattgggcgaagacggtgctaaagctacctatgaccgcctgacgaacgaccgtagagcctatgagactcgtgcggaaaactgtgcgcaatacaccattccgtccttgttcccgaaggagtccgataacgaatctaccgactacacgactccgtggcaggctgtaggtgcgcggggtcttaacaatctggcctctaagttaatgcttgcgttattcccgatgcagtcgtggatgaagctgaccattagcgaatatgaggcgaagcagcttgttggagaccctgatggactcgctaaggtggacgaaggtctgtctatggttgagcgtattatcatgaattatatcgaatccaacagctaccgtgtgacgctctttgagtgcctcaagcagttgatcgtggcaggtaatgcactgctttacttaccggaacccgaaggtagctacaatccgatgaagctgtaccgattgtcttcttatgttgtccaaagagacgcatacggcaatgtgttacagattgtcactcgtgaccagatagcctttggtgctctcccggaagacgttcggtctgcggtagagaaagctggtggtgagaagaagatggacgaaatggtcgatgtgtacacccatgtgtatctcgatgaagagtccggcgattacctcaagtacgaggaagtagaggacgttgagattgatggctccgatgccacctatcctactgacgctatgccctacattccggttcgcatggttcgcattgatggcgagtcttacggtcgctcctactgtgaagaatacttaggtgacttaaggtctcttgagaatctccaagaggctatagttaagatgagcatgattagtgcgaaggtcataggtctggtgaatcctgctggcattacgcagccccgtagattaaccaaagctcagactggtgacttcgttcccggtcgccgagaagacattgatttccttcaactggagaagcaagctgactttaccgtagcgaaagctgtgagtgaccagatagaagcacgcttatcgtatgcctttatgttgaactctgcggtacagcgcacaggtgaacgagtgaccgccgaagagattcgatacgttgcgtcagaactggaagatacgcttggtggcgtatattcgattctgtctcaagaactgcaattgcctctggttcgtgtgctcttgaagcaactccaagcaacctcgcagattcctgagctaccgaaagaagccgttgagcctactatcagcacaggtctggaagcaatcgggcgtggtcaagacctcgataagctggagcgctgtatctccgcttgggctgctctggctcctatgcagggagacccggacattaaccttgctgtcattaagctgcgcattgctaacgccattggtattgatacttctggtatcctactgacggacgagcagaagcaagcactgatgatgcaggatgcggcccaaacaggtatcgagaacgccgccgccactggtggggctggtgttggtgctctagcgacctcaagtccagaagctatgcagggtgcagcagcacaggctggcctagacgccacctaataaccctcactaaagggagacctcatctttgaaatgagcgatgactaaaggttggagtcctttggtttccctttatctttaacaacttaggagatttaacaatggctgaatctaatgcagacgtttatgcgtccttcggtgtgaacaacgcggtaatgaccggaagtacacctactgaacacgaacagaatatgctgagtctcgatgttgctgcccgtgatggcgatgatgcaatcatacttagcgaggaacctagttcttatgacgatgacccttatgcggctggtgaagacccattcgctgatggtgaagacgatgagggccgcattcaggttcgtatcagtgaagatggtaacgaagctgagttcgacactggtagcgataacgctgaggtggataccgaaggtgaggccgctgagtttgagccgctgggtgacactccagaagaactgagccaagtgactgaacaattaggtaagcacgaagaaggctttcagtcgatggtcgagcaggccgttgagcgtggactgagtgcagagtctgtgactcgtatctacgaagagtacgaagccgatggcatctctgagaaatcctatgcggaactcgaagctgctggatatagccgtgcctttgtggactcctacatctccggtcaggaagcccttgtagaccagtacgtcaatcaggtggttgcctttgctggtggtaaggagcgctttagcgcaatctatacgcaccttgaagcgaccaacccggctgcggctgagtcccttgagactgccatgatgaaccgagacttggcgactgtcaaagcaattatcaatctggctggtgagagttacacgaagaaattcggtaagccagccaaccgtagtgttaccaagcgtgctactccggttaaacctgtagctcgtcagaaagagggctttacgaatcaggctgagatgattaaagctatgagtgacccgcgttaccgtagtgatgctgcctaccgtcaaatggtagaacagaaggttatcgactccagtttctaattaaccctcactaaagggagagaccatagatgactacaatggttgaatcacctgagcacagaactttgtggacgctcccgtaggtgaaacattgagaaccaactcgattcaagtagtaaccaaacttttctttaaattaacataaggagattcaacatggctaacattcaaggcggacagcaaattggtactaatcagggtaagggtcagtccgcagcggacaaattggcgctgttcctgaaagtgttcggcggtgaagtcctgactgctttcgctcgcacctccgtgaccatgcctcgtcacatgctgcgctctattgcttctggtaagtccgcacagttccctgtgattggtcgcaccaaagccgcttacctgaaaccgggtgagaacctcgatgacaaacgtaaggatatcaaacacaccgagaaggtaatcaacattgatggactgctgactgcggacgtgctgatttacgacattgaggacgcgatgaaccactatgacgttcgcgctgagtacaccgcacagttgggtgaatctctggcgatggcggctgacggtgctgtgctggctgaactggctggtctggttaacctgcctgacgactccaatgagaacatcgagggtctcggtaagcctaccgtactgactctggttaagcctaagactggcgacctgactgacccggttgagctgggtaaagcgattatcgctcagttgactatcgctcgtgcgtccctgaccaagaactacgttccggctgctgaccgtaccttctacaccactcctgataactactctgcgattctggccgctctgatgccgaacgctgcaaactatcaggcactgattgaccctgagcgcggtactatccgtaacgtgatgggcttcgaagtggttgaggttccgcacctgaccgctggtggtgctggtgatacccgtgaggatgccccggctgaccagaagcacgctttcccggctacttccagcgctaccattaaggttgctctggataacgttgtgggcctgttccagcaccgctctgcggttggtacggtcaagctgaaagacttggctctggagcgcgctcgtcgtgcgaactatcaggctgaccagattatcgctaagtatgcgatgggtcacggcggtctgcgtccagaagctgctggcgctatcgtgctgccaaagacttcgaaggcttaatggtagcgcctttgagtatgaacgcggagagtgaagtggagccgacccaagaggtagccgccgaagtagctctcacgcctcaacagaaggccgccattactcgtgctcgtaacaaggcacttaagtctcaataacaacaagcaaaccccttgggttccctctttgggagtctgaggggttttttgctttaaaccctcactaacaggaggtaacatcatgcgctcttatgagatgaacattgagaccgcagaagagctatcagccgtcaacgacattctggcttccatcggtgagccaccagtatcaacccttgagggtgatgcgaatgctgacgttgcgaatgctcgacgtgtactcaataagattaaccgacagattcaatcacgaggatggacattcaatattgaggaaggtgtgactcttctaccggatgcgttctctggtatgattccatttagctctgactatctgtccgtaatggcaaccagcggtcagacccaatatatcaaccgtggtggctatctctatgaccgctctgcgaagactgacagatttccttctggtgttcaggtcaacctgattcgtctgagagagttcgatgagatgcctgagtgcttccgtaactacatcgtcaccaaggcttcacgccagttcaacaaccgattcttcggtgcgccggaggtagacggagtgttgcaggaagaagaacaggaagcgtggcgtgcgtgcttcgagtacgagttagactacggcaactacaacatgcttgatggcgatagtttcgttcagggtctattgacgcgttaatagtaaggaggcacttatgccagcacatagaaaagaaataatcaacgggtgtaaagagtgctctaagtgcctcacagttaaaccgttggaagagtttggtaagtcgagcagaccgggtggtcaatcccaatgcaaagagtgccgtcagtcaggtaagcgcggcaggcctgtaagccccacacaacgtgagtctcaccgggcgtgggtgttgctgaacacctatgggataaccgttgatgattttaacaaaatgcttgaggatcaagcgggtgtttgtaagatatgcggtaagggcccttctggtcgattcaagcacctgtgcgtagaccactgccacacaactggacaggtgagaggactactatgccacgcctgtaacaagtcattagggttccttgaggatgaccctgataggattaaacgtctaatagcttatttaggaggtacacaatgtcactaattagccagtcgattaagaacctcaagggcggtatcagccaacagccagatattctccggttcgctgaacaatgtagcgtacagattaacggttggtcttctgagtccgagggtctccagaagcgcccaccgatgattcaccttaagacccttggcgctgctgggtatgtgggtgcgcaaccttacgtgcatcttatcaaccgcgatgagttcgagcagtatttcgcggtgttcactggtgaagacattaaggtgttcgacctcgatggtaaggagtaccaagtacgtggagaccgctcttatgtacgaacagccaacccacgggaagaccttcggatggtaacggtggctgactatacctttgttactaaccgcaaggtggttgtgcagagtaacgaccaatcggtcaaccttccgggctttaaagaccaaggtgatgcgctgattaatgttcgtggtgggcaatatgggcgtagactctcaatcgagttcaacggggctgagcgtgctgctattcaactaccagacggctcacaaccagcacacgtcaatgaggttgacggtcaggccatcgctgagaagctggcggctcagttgcggaataacctaggtaacccaaacaatgaacaaaacccaaataagtggcgcttcaacgttggccccggattcatccatatccttgcgccaaataacgataacgtttggggactacagactaaggatggttacgcagaccagctaatcaaccctgtaacccactacgctcagtcgttccagaagttgcctattaatgctccagatgggtacattgtgaagattgtaggtgacacctcaaagactgccgaccagtattacgttaggttcgacctcaaccgtaaggtgtgggtagaaacaatcggctggaacacaaggacttacctgcactaccacacgatgccttgggcgctggtacgtgcttctgacgggaactttgacttcaagtaccttgagtggggtgctcgtactgttggagatgatacaactaacccatacccatcgtttaccggacagacaatcaatgatattttcttcttccgtaaccgtttaggcttccttagtggggagaacatcatcttgtctcgcacctcgaaatacttcaacttcttcccggcctccgtgtcaaactactccgacgatgacccaatcgacgttgcggttagccacaaccgggtgtcaaccttgaagtatgccgttccgttctcagaagagttactcctatggtctgaccaagcgcagttcgttctgacagcttctggtatcctttcgagtcgctccgtagagttgaaccttacgactcagttcgacgtgcaagacagggcacgcccacatggtgtaggacgtaatgtatactttgcatcacctcgcgcttccttcacatccattaaccgatactatgcggtacaggatgtaagctctgtgaagaacgcagaggacatgacggctcacgttccgaactacataccgaatggggtattcagtatatcgggtacaaccgctgagaacttcgcggctatccttacgagcggagcaccgaaccgggtgtatatctacaagttcctctatattgatgaagaaatcaggcagcagtcgtggtctcattgggactttggggacaacgttacggtgtttgcagcacaggtgataaactcaacaatgactgtattgatgagcaatgaacatgctgtgtggatgggacgcttgcacttcacgaagaactccatagacattccgggagagccttacagattatacatcgacgctaagaggaaatacaccatccctgccgggacgtataatgatgatacctaccagacgtccataagcctcgcagcgatttatgggatgaacttcactaagggtaaagtgtctgtggtcttccctgatggaaagattatagaggtagacccgccaatcaacggttggagcagtgacccggtgttacgacttgatgggaaccaagagggccaagtggtttacattgggttcaacatcccgttcacttatacgttctcgaagttcctcattaagaagactgctgaggacggctcgacggctaccgaggatattggtcgcttacagcttcggcgtgcgtgggtaaactatgaggactctggagcgttcaccatccgtgtgaacaacctgtcccgtgagttcatctacacaatggctggcgctcgtttgggttctgacaatctgcgtgttggtaggtcgaacattggcacagggcagtaccgcttcccggttgttggaaacgctcagacgaacatagtaactatcgagtcagatgcgtcaactccactgaacatcattgggtgcggctgggagggtaactaccttcgtcgttcttcgggcatttaacttaaagtctccctgcggcgaattaaccctcactaaagggagacactaatagatacgaggggttaaagcattatgtacattacaaagtgtttacaaatccatgccgacaactttcagccgtccatagaggacattctggaagctgaggcactaggtgttgaaccaaaggtaattcctgatgagaacactgtggcaatgcttagcgataacgctgtgttggcaattggtggcaatcagggagaccgagtgtggttccttacctctaagtacgtcccactgtttaacttaaaggagcgcttagagtttcgcaagttaatagtcgaatatcgtgatacgatgctgaaccagtacgagtccatttggaacttcgtatgggtaggcaataagtcacacattcgtttcctaaagacaatcggagcggtattccacaacgagtacactctcgatggtcagttccaactattcacaatctcaaggaggcagcgtgaagagatgtaagaaatgcggagaacttaaggctgtctccgagttctataaggacaagaagagtaaggacggcctacggagtcactgtaagccctgtcactacgtgtattacaagaaggactactcaaaggcgcgagagtttaaccttaagcgactgtacggaattactctggaagaatatgaagcgatgctccttaagcaagatggagtgtgcgctatctgcggtcttaccgagagagttgagggacgggcgttagcggttgaccattgccacgccactggcgctgttcgtggtctcctttgctctgcctgtaacatcgctcttgggaagttcgaggacgacaccgagcgtcttcggaaggcaataacatacctaggagggaattgattatgtgttggatggcagcaatcccaatcgccatgatgggtgcccaagctctaagtagccagaacagtgctgacaaggcacgagtggcacagacagaagctggacgccgacaggcaatggagatggtcaaagagatgaatatccaaaatgccaacgcctcgctggaacaacgggacgcccttgaagctgcatcctctgagttgacttcacgtaacatgcagaaggtacaagctatgggaaccatccgtgcagctatcggcgagagtatgctagaaggcgaatccatgaagcgcatcaagcgtatcgaagagggcaactacattcgggaggcaaacagtgtcaccgagaattaccgccgagactacgctagtatctttgcgcaacaattgggacgcactcagtccacagcaagtcaagtagatgcagtgtacaagagcgaggccaagggtaagtctggtctgatgcgtgtactagaccctctgtccattatgggtcaggaagctgcaagtcaatatgcggctggtggatttgacaagaaaggcggcaaccaagcagcacctatcagtgccgccaaaggaaccaagaccgggaggtaataatggctagtaaactaaatagtgttttaggcaatatggcgactcccggtatggaacgactccggggcgtcaaaggtatggactaccgggcagcaaccattcaggctgaacaaccaagggcgagtcttctggactccattagtcgattcgctaaggctggtgccgatatgtatatggcgaaagatgaacgtgataagcaacgagccgatgagcgctccaacgagattatccgtaagctgacccctgagcagcgccgacaggctatccagaatggtacactgctgtatcaggatgacccatacgcaatgcaagccttgaagttcaagacagggcgtaacgctgcgttcctcgttgacgatgaggttcaacaggccatcaaagagggtcgcttccgtactcgtgaagagatggagcagtatcgtcactcacgcctacaggaacagtcgaagtcgttcgctgagcagttcggcatcaatgagatggatgaggagtaccagaagggtttcaatgcgaacatcaccgagcgtaacattgctctgtatggcgcacatgataccttcctgagtgaccaagcgcagaagggtgctatcctgaactcgaaggttgaactcaacggtgtcctgtctgaccctgacctactgtctcgtcctgagtccggtgagttcttccagaactacattgacaactccttggtgacagggatgaccgacaatcaggctcagcaggttatctcttcgtccttgaatgacgtgctacagcgtccgggtggtgccgccttcttgcagaacattgagaaccgcaaggtaactcttaatggcgctacgactacctatcgtgaactgatgggtgatgaacagtggcaggccatgatgattaaggcacagcacactcaattccagaacgacgcgaagttgactgagaggttccaactgagtatcaactctgcgcttaaccaagaggatactggcaagggatgggaggcgctccaaggtatcaaggcggaactcgacaagattcagcctggagaagaacttacgcctgagcgccagcagctcaatgatgcccaagcgcatatgcagacgcgcttcaaacaagaggccgctgagactgcgaagctgatggacaagcagcgtaagaccctgaataaatctttggtcatcgacaagcagttccagaagagaatcaatggtgagtatgtctcaactgactacaaagatatgccaacaaacgagaacactggagagtttgtccatagtgatatggtgaactacgcgaaccagaagttagcgcagattgacgctatggacattccagaggcgcagaaggatcgcatgaagttgcagtacctccaagctgactctaaagatggtgcattccgcactgctgtaggtcagttggtgtcagatgctcgtggtgagtggaaggcggctgtcatcaatggcgagatgcctgatagcacaccagcccttgactccctacgcaagatgcgcaacattgaccccggattgttcgcagcactgtatcccgacgatgccgagctgtttcacacaatggatcaattggatcgacaggggataaagccgcaagccctcattaacgccaccaaatcccgtcaagggaaaacgcgtgaaatgcagattgaggatgagcgtgcgttcagcgagctgatgaacaactctgagcagcccgaactgaaataccttccggcttccatgcgtgagtacgctcagattatttatgactctgagaagtacctaacaggaaaccctaaggatgccatatcagcggttagttcgttcctaaaggacactacctatacattctcttcggataacgtagatggtggaacctacggtgtaatccctcgcaacatgatgcaggtaacagatgaccctaaatcttgggagcaaggtaaggatatcattgagcaagctgttaagaagtaccaagagcaaaacccttgggttaccaacaaacagcttaaggttagccaacagggtaacttaatcaagatttacgataccactaccaacttgggcataagttatgataacgcactgctacgcaaggtgtataagaactatgctgagcaacaggctgcatcggctgagaagaaagccttaacggaagccaataagcgagcacctatcgtcgcggcaaccaaggcccgtaaagaagcagctaagcgtgtccaagagaaacggaacaaggttcctaagtttatctatggacgtaaagaagactaacagtaaactataaggaggctccatgagctacgacaagacgaaaccatccgagtatgatgggttatttcagaaagcggcagatgaacatggggtctcctatgacctgcttcgtaaattagcattcaacgaatctggcttcaatccgaaagccaaaagccctaccgggccgttgggtatcatgcagttcactaaaggtacggcagcggggcttggactcaaggtgacagggggagatgacgatgagagattcaaccctgagttggctgtggacgcagcagctcgtcacctgagcgacctcgttaggaaatacgacggggatgaacttaaagcggccctagcgtacaaccaaggagagggacgcaatggcgctccacaaatgcaggcttatgaccgaggcgattgggcctctatcagcgaggagggccgcaactacatgcgtaaacttctcgatgttgctaacagcccgcgcaagggagacttggaggcgttcggtgggataaccccaaaggctaaagggattcctgctgaggacgcctttgctggaatcggtaaggccgggaaggtaggaactgagcttccacaatcaactggctttaagctggagggtgtggaacaacaggaacctgccgtaccgttcactaaggatttctacgataaacatggaactaccgttgaggaatatgaaaaccgttcaacattcttcgggataaaggacaccacaagtgccgagcttcataactcgctattgggtgttgccttcaatgctgcgcgttttgatgatagttttgacatcttcaaggacgctattaccccaactcgatggaactcctaccagccgacagctgaggatcttgacaagctccgcaacagtgggcttcctccgagttactactcagtggtgacaggtggtgacggtgataactgggatgacctgattaagatggcgaagagaaactacgagatggacgtgaaggctgctgatgctggtgtgggagcacaattggttggcggaatcgtgggagctggtgttgacccattgagctatgtgccgcttgttggtgttgctggaaagggtctcaaggtggtaaacaaggcgttcgttgttggtgcccaaagtgcagccttgggcgcagtttcagaagctgttcgcacatccgttgctggtggtgaggcgcactatcaagatgcaatccttgggggtcttatgttcggggccgggatgagcgcaatagctgatggagtgagtgcagcattgggccgtgttcgcgctggtcaagttagtaacgacttcgaccgcatggctactcgactggaggcgcgtgagtctgcctttcaagctggtggcgaggacttaacacgtatgccaacagagggtcgtacatttgacggggaacatgcgggtgtaaactactctcaacttgaaactgaaccgggggctgtggtgctgccgcaaggtcaaatcttgagtgacaccaacccgattaaccctcagacacttcatgagttcgagcaggttaaccctgagcgagcggctcgtggtatctctttgggtggattcgctgagatcagcctcaagacccttcggtcggagaatgagactgtgcgctccattgcgagtgaccttgtgcgttctccgacagggatggaatcaggctctaacggtaagttcggtgcgactgcttctgacattaaggagcggctccacgcgaacaatcagcgcacctacaatcagctttatgatgctgtgcgtactgcaatgaaagaccctgagttctctacaggtggtgtgaagatgagccgtaaggaagtacgtcaggaaatctataagcgtgctgccttagcgattgagagaccagagctacaatcgggactcacaaagggagaacgtaaggtgatggatatcctgaaacaacacttcgacctcaagcgagaactcatggaaaaccctgctatcttcggtaacgccaaagctcgtagcatcttccccggctcacgccataacggaacctacgtgcctaatgtgtatgaccgcgccataaagttgtacatggtgagtcgctacggtaacgagggactacaacgggcaattgcagagtcgtggcttacatcttaccgcgctcgtccagaagtcaaggcgagagtcgatgagtacctgatggagcttaacggtctcaagacggtacaggaagtaacaccagatatggttcagaagcacgctatggacaaggcgtatggtatatcgcacactgaccaattcacttcctcctctatcattgatgaaaaccttgagggtctggttggcatcgagaacaataacttcttggaggcccgtaacatgttcgacagcgacatggctgttaccctcccggatggtagcacgttctctgtgaacgacctgcgtaactacgatatggctgacattcttcctgcttatgaccgtcgagttgacggtgacgtggctatcatgggtggttcgggtaagacgacgaaggaactgaaagatgaaatcatggcgctggacaagcagtctgagggtaacggctcactgaaaggtgaagtcgaagcactcaaggacaccgtgaagattctgactggtcgtgcccgcatgaacccagagggagctttcggtacgattcttcgctccatgactgacttggctttcttcgctaagaacttctatatgccgttccagaacttcactgaggttgctgctatgttgagtaaaggaaacacctctgcggtacttcatggaatcccactgcttaacgattgggttagccggaggaagcctatgagcggctctgagattaaggagattcacagtatggtgttcgggaaggaactagaccagcttatgcgtccggggcgcgaagaccatatccgtcgccttcgggagtctactgacactaacgcagtggtggctaatgtggttgggactattcgcttcggaactcaggaattgtctgcgcgctcaccttggacgatgctgcttaatggaacctctaactacatcatcgatgctgccagacagggtgtactgggtgatgtggctggggcagcgctcgctgggaaaggatctaagttcggtaaagcgaattaccttaagtctgcctctgtgtcacctgagcagtggaagggaataaagcagttgttccgtgaccacgccactcgtgatgctgacggtaagtttacaatccgggacaaacaggctttcgccaatgacccacggactatggacttatggcgtctggctgataaggttgctgatgagactatccttaggccgcataaggtttcctcacaggacgccaaggcttacggagcggctgtcaagatggtgatgcagtttaagaacttcgtaatcaagtctcttaactcgcgcttcgtcagattgttttatgacgcgactaagaacaacagggctatcgattctgcgctgactgcaatcatctctatgggtctggctggtggttactatgttgctcaggtgcacttgaaggcttacggcctacaggagcacaagcgtaaggagtacctaaagaatgctcttgaccctaaaatgattgcccacgcgtcattatccagaagttcacaccttggttccccactgtctgtctatgatatgattggtggcttgttcggtaatgatacctaccagtacacccgctcaacggtgttaccaaaggaaaagaccgaacgtgaccgaaacaaggcttggactggtaaggaggttgcgggtaacatagtaggggcgatatccaaccaagtaccagctgtaggactagttgggaatattgggtctaccgccatgaatgcctctacgctacttagctctgatggtaagcagagtgaggtagagttccgtactggtgtgttcaacgccatgcgtgagcttgtccccaatgacccgctgacacaacagttgattatgcacatcttcgaagagcagggcatcaagattaaggatgatgcaacacgccctcgccaataaaccctcactaaagggagagaggtcacattctggcctcttctctcttaatgctaatttacaaaggaggtcacatggctacaaatattaagaccgtgatgacttacccgctggatggctccactacggacttcaatattccgtttgagtatctggcgcgtaagttcgtcagagtgacacttatcggtgttgaccgaaaggaactcatcttgaatcaagactatcgttttgcaactaagaccacaatctccacaacgagagcattggggccagcggacggttataacatgattgaaatccgtcgatttacctccgctaccgataggctggttgacttcaccgatggttcaatccttcgggcatacgacctgaacatctctcaggttcaaacccttcacgttgcagaagaggctcgtgacttaacggctgataccattggtgtgaacaatgatggcaaccttgatgctcgtggtcgtcgtatcataaacgtagctgatggtgttgacctcggtgatgttatcactttaggtcaagtcactcggtggaacgagtctgccctgaactctaagaacgccgctgctacctctcaggccgctgccaagacctcagagaccaacgctaagacctcagagaccaacgctaagacctctgagaccaacgcgtaccaatgggcgcagcgtgctgaggactctccggtacagggtagcgagttctctgcgtatcattactccctcaagtccgcaaaaagtgcaacagccgcgcatacgtctgaggtcaacgctaagacctctgagaccaacgctaagtcctctgagactaacgctaagacctctgagactaacgctgcatcgagtgctgctaaggcttctgaggaggctgctaagctgactaacatgaatgactttgctgccgctattgattcagtcaacggtaacaatgttgtcatgaagggtgacttcaccattaaaggaaacggtaaagtatcaatactgaaccacagtgggctataccaagataagaccgttaatggcgtgaactatgccaacaggatttatatggatgatgcaggggccatgcacttcgagaactaccgtgtgtctggtgcttcatccaccttacgtgctggttttgttattacagataccaacaggtttgactttacagggccaacgcgagttaatggtgaatctaccgtatatgtgtatgcgccccctaatccggctattggtcaatacctcaatgctgtggcagttcgctcacagcttcggggccgtggtggtaatggtgatccacttggtgcgtactgtggtatgtatattcaggagcacgttggtacagaccacgcgataatccttaacctcaatggttatagcaaggatactaactggcagctattctccaatggtaaaatatctacaccacttggtgatgtgatgacttcaggttctgatgttagaatcaaggatgatatcactaaacctcttgatggtgctggtgagcgtattgacgcaattggcatagtggaatacacagagattgccaccggggaacgtaaacgtgggtggctggcccaacaacttgacacgattgacccgctgtacacatacctaacgaccaccgcagaaggtagtcttttgaataccaacgacagggcgttgcttgctgacgtaataactgagcttcaagcactgcgtcaacgcgttaaagaactcgaaggacaatcaacaaagccagcggacggcacaacataaggagaacacaatgctttcttttgacttcaataacgaggtcgttaaggctgcgccgattgttggcacaggggtcgctgatggtgcggcccgactcttttggggactatcgttaaacgaatggttctacgttgcagccatcgcctacacagtggttcagattggtgccaaggtagtcgataagattattgactggaaacgtgcaaataaggagtaacctatgagcgacaagactttaatcaagctgctggagatgctggacacggagatggcacagcgtatgcttgctgacctccagagcgaggaacgccgaacgccgcagctttacaacgcaatcggcaaactgttagaccgccataagttccaaatcagtaagctgaccccggatgagaacatccttggcggtctcgcggctggtctggaagactacaacaaagtggtcggccctaatggtctgactgacgatgagaccatcacgctacagtaagtgacatactcaaggttctccacgtggggagcctttatggatgttatttggtgcatctgtgtgaaatctgaaaattgatgggaggtgttatgctaaaacttttacgcagcgcactcccttgggtactcgccgggacactctttatgggtggctggcacttagggtcaacccatgagagagcaaactggaaggaggtaatccaaaatgaatacattgcgaaaacaaaagcaaccgcagcaactcaggcagaggtcagtcgggtatcccgtgagtaccaagaagagattgcagccattgaaggcagcactgataggatgcttaatgacctgcgtagtaataataagcggctgtcagtccgcatcaaaacccttaccggactgccagaagataacggtagatgcgagtttaatggtcgagccgaactacacgagtcagatgctaagcgtattatcggaataacccaagctgccgatgctcacgtaagagcgctccagcgtactattaaggagatgcagaatgagcgacacccaagcaaaccgtaatgcgctaatcattgcgcagcttaagggtgacttcgtggccttcctgttcgtattgtggaaggctttggctctcccgccgccgactaagtgtcagattgatatggcccggtgtctggctaacggagacaacaagaagtttatcctacaggctttccgtggtattggtaaatcattcatcacctgtgcgttcgttgtgtggacgctatggcgtgaccctcagttgaagatactgattgtctctgcatccaaagaacgtgcggacgctaactccatcttcatcaagaacatcattgacctgctgcccttcttggctgagctaaagcctcgccccggtcagcgtgactctgtgattagtttcgatgttggccctgccaagcctgaccactctccgtctgtgaagtcggtgggcatcactggtcagttgactggtagccgtgctgatatcatcatagcggatgacgttgagattccgtctaactccgcaactcaaggtgcccgtgagaagctgtggactctggtgcaggaatttgctgcgcttctgaaaccgctgccgacttctcgcgttatctaccttggtacgcctcaaaccgaaatgaccttgtacaaggaactcgaagataaccgtgggtacaccacaatcatctggcctgcgctctatccgcgtagccgtgaggaagacttgtactatggcgaccgtctggccccgatgctccgcgaagagttcaacgatgggttcgagatgctccaaggtcaaccgactgaccccgtgcgcttcgatatggaagacctgcgtgagcgtgagttggaatacggtaaggctggcttcactttgcagttcatgctcaacccgaacctgagtgatgccgagaagtaccccttacgcctccgtgacgctatcgtgtgcggtctggacttcgagaaagccccaatgcattaccagtggcttccgaaccgtcagaatcgcaatgaagagctacctaacgtgggccttaagggtgatgatattcatagttatcattcgtgcagccagaacactggacagtaccagcaacgcatcctcgtgattgaccctagtggtcgaggtaaggatgagactggttacgcagtgttgttcaccctgaatggctacatctatctgatggaagctggcgggttccgcgatggttattccgacaagacccttgagtccctcgctaagaaagcgaagcagtggaaggttcagacggtggtcttcgagagtaacttcggggatggtatgtttggtaaggtattcagccctgtgctcctgaaacaccatgcagcctctatggaagagattcgtgctcgtggtatgaaggaactacgcatttgtgatacgctggagcctgtactctctacgcaccgccttgtgattcgtgacgaggtgattcgtgaggactaccagactgcccgtgacgctgatggcaagcatgatgttcgctattcgctgttctaccagttgacccgtatggctcgtgagaagggcgctgtggcccacgatgaccgacttgatgcattagcattgggtgtggagttcttacgctctacgatggaactggacgccgtgaaggtggaagctgaggtgcttgaggcgttcttagaggaacacatggagcacccaatccattcggctggtcatgtagttaccgctatggttgacgggatggaactctattgggaggatgacgatgcgaatagcaacaggttcattgactggtagttatgcatattgagtgcataaggaagcatcgagaccacggatggtcactttaagaaactccttaagaatcaatgagtttgaattaaccctcactaaagggagagaggggacttaaagctactatataggttagtcattcaggttatgcaatgaccttttatgcactttaagtctacctctgtgattggtgatattatcattatataatcacctaccttagagcaactgaaaggaggtggctcaatgttacgcttgctgattgccctgctgcgtcatagagtcacttggcgatttcttctggtacttactgctacccttgggtacgcaggccttactgaccacctcggtcaactggaagtggccttttgctctatactctcttgtggggattaaattattgttgatgacagacaagcggctctgagggattcgtaggtatagtttcactacaccaactcatccctgtagagtcaaccctaaaggttatacctaaagatgccctgtagttcgtaatggtcttacagggtcttctggtgtctcctagctatcccttctggatgcgcctatggtctcacctatggtgtggccttacctaaagtggttgcctaaagagaccctttaagaatttaccacaaaaatctgaatgggtatctcacagttcaagaaaccaaagtacccccatagccctcctaaagccacctaaagccagccctacccctagggtttaaccttcggttaaccttgggtatctcctcaagtggcctataggatagcctaaagtgttgcataaagtcaatacctaaagaggcggatggcttaaagaggccttgaagagtgtcctagtgtaccagttcgatagtacatctctctttgtgtccct

SEQ ID NO: 24 - DNA, 38190 bp, Unknown
  source: /note="Description of Unknown: KP2W-P0104 Bacteriophage sequence"
atctgttagccattcctaaagtaaaccctaaagccatcacctaaagctatcacctaaagagcggcgctatcttaaagacaaccagaccgatagacccattgttaacctgtagtgatgccttgtagttatctgtagtcgtttcattaaccctcactaaagggaataagggatacttaaagagggaataagggaataagggatacttaaagagggaataagggatttaataaaagattaaaattaatggttgactttaagtaacccttaaggctattattcatctcgtcaacgggacaacggccttaaagccactccctgagataccggagtcaaccggataagtagacagcctgataagtcatacgaaaaacaggcattgacaacatgaagtaaacgcagtaagatacacagcgtcaaccggacacaaggtgtcttctaggtgacttaagcgcaccacggcacataaagcgaaacaaaatggttgacaacatgaagtaagcacggtacgatgtaccacgaaatgacggaacagtgaggcgggacactgaaagccgctagggtctaacgaaaccagaccgacacgctctttaacaatctggataatagctcttgagtgtaccgatgtataagcgaataactcaaggtcgcactgaaagcgtggcctttatgatattcacttaacacgaactaacatgaggtaacaccaaatgattttcactaaagagcctgctaacgtcttctatgtactggtgtcagctttccgttcaaaccttgatgatgaggtgaacatgagtcgccaccgccacatggtaagcactttacgtgccgcaccgggtctttatggctccgttgagtcaaccgatttgaccgggtgctatcgtgaggcaatcgcaagcgcaccgactgaggaaaaaacggttcgtgtacgctgcaaggacaaggcgcaggcactcaatgttgcacgcttagcttgcaatgagtgggagcaagattgcgtactggtatacaaatcacagactcacacggctggtctggtgtacgctaaaggcatcgacgggtataaggctgaacgtctgccgggtagcttccaagaagtgcccaaaggcgcaccgctgcaaggctgcttcacgattgatgagttcggacgccgctggcaagtacaataagtgatagactcaaggtcgcactgtatgtgtggcctttatgattatcacttagcacgctataggactaacaccatgaaacgatactccatccttattcccggctggtgctactcaatgacctgctacgggtacaacgaaagggacgcccgtgcacgcttcagagaccaacaaggcttcggcaagcgtttacctaatggtacggctgtatgggaggtgactgtatgagtaaacttctggcaacatctaaaatcaagggccaatgcactgtaacgctgcgtgagtattaccacgggtcaatgggatgcacctacgttgtgcgctacggcaaacaggtcacacattgggtaaacccgattttagcacaagaggattatcaagcctgtgtgatacaccaagcaacatgcgctggctggaatgattgacattacaggaggattagcaatggttatctttatcgctgtcgcactctttgcggtcgctggctggtactctgagtcacgcaaggccgctcgctatcatcgcaagatggttaaactcatggaacacttggacgcagaagggcgaggccacgaggctatcgaactggtgaaacacgcatgatgattctctttatcgcactggtctatctgtgcatcgctatgtactttatgcgagactttaagcacggtctggtagtccataaagcaacactgagctactttaagtggggattcatcccacggtttacggttcgtgaacgtaacggacgctttaaggccaacaaggtaggagtattctacattgctacgcactaactcaaagcacgtaaagattgcattgtatgctatggcgtatggtgcatcgaaacgcaaggtcaaacgcatcttaacgagacaccgcaagatgaccgcacgacaggctgcaagcgctgtcaaatgggctgaatttactctttactcttcttacagataacaggacactgaacgatgactttcaccgaagcacaagccgcactcgaagctatccgcaacctaccgattgagcgcctgaacgaacgccagccaatgctggtggctcttgcggctgctatcgtgaacgatgagactcaagacggcgaactgacgcaggccaaaggcaattggggcttggagtctatggactactggcagacactggcggagcgtatgcgtgatgttggtttcatcaagctgggcaacggtcactttagcgcagcatatgagcacgcattgttaccgggcaaggttatcaaggtaggctttaagaaagaggactcaggcgctgcctatgctgccttctgccgcatgaatcagggtcgtgagggcatccctacggtgtacgacattcagcgtcatacgggctgctacacggtggtcttggactatctgacaccgcttaacgattggtgctacggtgaaagcgataagattcgtcaccactttcgggctgcacgggaaatcattgaggaggattgcttcgacaccgccgaagagtacccaataagtgacgggttcattgagacctgcaaggatatccgcaagttcttcttaggcatcgcatcgttcgactgtcacagcggtaacatgatgaaagaccaaatgggccgcttgattatcacagacccggtatcgttcagcgcagacgacaagttaaagccgggtgagttccactgtgacccggatgaactcatcgctgagattgaggcgctgagagcgcaggaagcgattgaccgctgtaaggcacgcaaggcacgccgtgaccctaaaggagactttcaggtagcacgtaaagcccgtgccaaatggcgcagaaaggcctctaagcgtgctaaacgtgacgctaaggtactcgctaagatgcgcatggacgccaatcagaatcgcagggatgagcctagggcgcgtatggtgtggggcgataagcactggcgcaacgcttggatgcaccacaataacctaaactttgcagaactggagcgccacgctgctgcggcaatgatgatgcacgacgaggtgcgcattcagtggggcaaaccgttacacatagacgcataccttgacaagcgtctacaaggctgatagagtcttatcttacaggtcatcaatcggtggcctgaataggtacgatttattcacaatgaggtaagcaatgaacatcatcgaaaacatcgaaaagaatgacttctccgaaatcgaactggctgctatcccgttcaacacactggctgaccactacggcagcgcattggctcgtgaacaactggctttagaacatgagtcttatgagctaggcgagcgccgcttcctcaagatgcttgagcgtcaagcgaaagctggtgagattgcagacaacgcagccgctaagccgttactagctacgcttctccctaagttaaccacacgtatcgtcgagtggctcgaagagtacgcatcgaagaaaggccgcaagcctgtagcctatgcgccactccagttactcaagccggaggcgtccgcgtttatcacactcaaggtcatccttgcgtcactgaccagcacgaacatgacaaccattcaggccgctgctggtatgctggggaaagccattgaggacgaggcacgtttcggtcgcatccgtgacctcgaagcgaagcacttcaagaagcacgttgaggaacagcttaacaagcgccacgggcaagtctacaagaaagcctttatgcaggtggtcgaggccgatatgattggtcgcggtctgcttggtggtgaggcgtggtctagctgggataaagaaaccacgatgcacgtagggattcgcctgattgaaatgctgattgaatccacgggtctggtggaactacagcgccacaacgcaggtaacgcaggctctgaccatgaggcactacaactggcccaagagtacgtggacgtattagcgaagcgtgcaggcgctctggcgggtatctctccgatgttccagccatgtgtcgtaccgccgaaaccttgggtagcaatcaccgggggcggctattgggctaacggtcgcagacctttggcactcgttcgcactcactctaagaagggcttgatgcgttacgaagacgtttacatgccagaagtctacaaggctgtgaacatcgcgcaaaacaccgcatggaaaatcaacaagaaagttcttgcggttgtcaatgagattgttaactggaagaattgcccggtcgcagacattccatcgctggagcgccaagagttaccgcctaagccggacgacattgacaccaacgaggcagcactcaaggagtggaagaaagccgccgctggtatctaccgcttggacaaggcacgagtgtctcgccgtatcagcttagagttcatgttggagcaggccaacaagttcgcaagcaagaaagcaatatggttcccttacaacatggactggcgcggtcgtgtgtacgctgtgccgatgttcaacccacaaggcaacgacatgacgaaaggtctgttgaccctcgctaaaggcaagccaatcggtgaggaaggtttctactggctgaaaatccacggtgcgaactgtgcgggtgtcgataaggttcctttccctgagcgcatcgcgttcattgagaagcacgtagacgacattctggcttgcgctaaagacccaatcaataacacttggtgggccgagcaggattcacctttctgtttcctcgcgttttgcttcgagtatgcaggcgttgcgcaccacggtctgagctacaattgctccctgccgctggcgttcgacgggtcttgctctggtatccagcacttctccgcgatgctacgcgatgaggtaggcggtcgtgctgttaacctgctgccaagcgaaaccgtgcaggacatttacggcatagttgcgcagaaagtaaacgagattctcaaacaggatgcaataaacggcacacctaacgagatgattaccgtgaccgacaaggacaccggggaaatctcagagaagctcaagctgggaacctcaacgctggcgcaacagtggctggcatacggtgtaacccgtagcgtaactaaacgttcggtcatgacgctggcttacggttccaaggagttcggctttcgtcaacaggtactggacgacaccattcagcctgcgattgacagcggtaagggcttgatgttcacccaacctaaccaagcggctggctatatggctaagctgatttgggacgcggtgagtgtgaccgtagtcgcagcggttgaggcgatgaactggctcaagtctgccgctaagctgctggctgctgaggtcaaggacaagaagaccaaggagattctgcgccaccgttgcgcggttcactggactacgccggacggcttcccggtatggcaggaataccgcaagccactccagaagcgtctcgatatgattttcttagggcaattccgtctgcaaccgacgattaataccctcaaggattcaggcattgacgcacacaagcaggagtctggcatcgctcctaactttgttcactcacaggacggtagccacctccgcatgacagtcgtttatgctcacgagaagtacggcattgagtcctttgcgctgattcacgatagcttcgggactatcccggcagacgctggcaagctgttcaaggctgtgcgtgaaacgatggtcatcacctacgagaacaacgatgtgctggcagacttctatgaccagtttgcagaccagttgcacgagacccaactggacaagatgcctccacttccgaagaaaggaaacctgaacctgcaagacattctcaagtctgactttgcctttgcataacaagcacttagcattaaccctcactaacgggagactacttaaggtctcccactttaagacactttaggtactaagagattaaatttatgattaacattaagactttctttaagaacatctttaagtcaaaccgcttgacttccgttaagttctacgcttggatgcccggtagcgatgacctccgcaagactgaatttaagctaggcttagggccgtgcggtaaggtggtcacgaagttggaatgttactcaacgtcctccgggatggtcatcttccagaccactgaggacaacgaaatgaaatccttctactacccgaaaggttcaacgtgtggtcgtatcgaacggacatacagttaacactcactaacaggagagttagcctcaaggtcgtccaagcgggtggcctttgtgattaactttcaatacacatcaacatgaggtaagatactatgcgtaccaactttgagaaatttaccaagcgcgattcagtggtcaacgagcatggcgaacagtggcaagagcgccgtgaccgcatgaagaaacgccacaaacaacagcgcggtaactcacagaaacgggagtggaactaatgatgggacgtatctatagcggcaacctgaacgattacaaagacgcggtagcacgtctacaggaagaccatgacgtgaccgtgaaggtggagtcattcagatatgaaaacccagcgaagatgtgcaggtcatcgggtgaggttctccgtgtgttcacacgctccgggcatccggtggcatccagaaccttcgagcacagcgacagtgatgtacaaatcaacgcgcagactgcatggctccgtagggttcacagcgatttgaaacactggaagtaataaccctcactaacaggagaatcctcaaggtcactttaacgagtggcctttgtgattcgaactgattaactttcaaccaatgaggaacaaccgtatgaacatcttcaataccaacccattcaaagctgtgtcattcgtagagtctgccgttaagaaagcgctggagacctccggctacctgattgcggacattaagtacgatggtgtgcgcggtaacatcgtggttgacaacgtggctgaggctgcatggctgtcccgtgtgtccaagtttatcccggcgctagaacacctgaacggattcgataagcgctggcagcaactactgaacgatgaccgctgcatcttcccggatggcttcatgctggatggcgaactgatggtcaaaggtgtagacttcaacaccgggtctggcctgctgcgtaccaagtggctcaagaaggataacgccgagttccataacgtaatggtcacaccagacatgctcaagccacgtaaggtgggagtagctaaacgggttcgcaccgcctttgagttagaccctaagcgcctgagtgtgcgcctgtatgcggtcatgccaattcacattgctgagtctggcgaggactacgatgtgcataacctcctgatgccatatcatgtggaagccatgcgctctcttctggttgaatacttcccggaaatcgagtggcttatcgctgagacctacgaggtctacgatatggattcgctgactgaactgtacgaagagaagcgtgccgaaggtcacgagggtctcatcgtgaaagacccgcaaggcatctacaagcgaggcaagaagtctggctggtggaagctcaagcctgagtgtgaagctgatggtatcattcagggtgtcaattggggaaccgaagggttagccaacgagggtaaagtgataggctttagtgtgcttcttgagactggtcgtttagtagacgccaacaacatctctcgcgcactgatggacgagttcacagccaacgttaaagcccacggtgaagacttctacaatgggtgggcctgtcaggtcaactacatggaagaaacccctgacggctccctgcgtcaccctagcttcgagaagttccgaggcactgaggacaaccctcaagagaaaatgtaaccgcgcactggctcaccttaacgggtgggcctttctgcgttccgggcgttgccgcctattaaccctcactaacaggagacacacgtcatgtggcttatcctattcgctatcgtcgcaacgctgggattaattgctgccgacgacaacatttggcctgattgttaaggagataacaccatgcgtttacacttcaacaaatccaatggtatcttttcggttcgccgtaaagaccgctcaactgtgctggcctctgagcgcaacgctaagctgcctctgattggctcagtcgctacgctgtcaccttgtgttcacctgctgattactcgcggtgagttcgtcaaggcgatgaacaaagagcgtccgcatctggaagccgtggtcacttactggcctcgcgttcgtctgttcttcaagtggattaaggaggtactgtaatgctacaacatcattggaacaaaccagacttagaggctcgcttcccggttaactctgttgtgcgatactccggcggtggtctcaagcgcatcttgggtatgagcggagtggtcactggttactcgcacacaggccgcgttaaggttcgcttcggtactcagcacgctgaggttcttccgcacaacctgattccgctaccgaaagctggcgttaagactccgaacgtggaagcaccgaaggaagtcaagtctgacgtgacccatccgaaccactatatgctgttcgacaacgtggaagccattgaggttatcgcccggtcgatgaccgttgaggcgttccgtgggtactgcttagggaacatccttaagtatcgcctgcgtgctggcaagaaatccgaactggcaactatggagaaagacctcaagaaagctgcattctatcaggaactctttgacaaacaccgggggctgtgttatgacgcttcgtgaatgctgcgattggtgtgccgctaagtggaaccaagctatcgaggctggtgatgaggctgctgccaacgcataccaacaactatacgcgctgtgggagcggcgctttaaggaggccaataaatgagccaatgtaacaacgggtgccagtacgcgaaggacgtagggatggagaaccactcctgtgcaaatcgctgcatgtactcagaacagaaataccttctgacaatggaaggtaacaccgagtcctttgagattccggtattcgcccggtctctcgaagaggcaacgctacaggctgaacattacgaggacgcagggttcgtagttactcgaatccgtccagaagtgaaagcctaattaccctcactaaagggaacaacccaaactatcaaccaaaggagaaatactatggctggtttcaagaagaaaatctacacctctggtcttggcactgctgagccttatgcttacctgagtaagccggattatggcaacgaagagcgcggcttcggcaaccctcgtggtatctataaggtagacctgactctttccaataaagacccgcgctgtcaggcgatggtcgatgaaatcgtgaagactcacgaagaggcttatgctgctgccgtggaagagttcgaggctaacccgccgcaggtacagcgtggtaagaaaccactgaaaccttacgagggcgacatgccgttcttcgataacggtgacggtacgactaccttcaagttcaaatgctatgcgtctttccaagacaagaagaccaaagagaccaaacacatcaatctggtcgtggtcgatagcaagggcaagaagattcaggacgttccgattatcggtggtggctctaagctgaaagtgaaatactctctggttccttacaagtggaacaccgctgtgggcgcaagcgtcaagctgcaactggaatccgtgatgctggtcgaactggctaccttcggtggtggcagtgaagatgagtgggccgatgaagtcgaagatggtggttacactgcgagtgaatcccgtcagtcccgcgatgagcaggagtggcaggaagacgagcacgaagaaaccccggatgatgacgaggacttctaatggctggcgcatacgctgcgcgaggtgtacgcaaggtcggggctttccgctccggcctagaagataaagtctcaaagcagcttgagagtaagggcattaagttcgattatgaactttggagaatcccttacgtcatccctgcgagtgaccacttatacactccagacttcctgctacctaacggtatcttcattgagaccaaagggctgtgggattccgatgaccgcaagaaacaccttttgattcgtgagcaataccctgaactggacattcgcttggtcttctcaagcagccgctcaaagctctacaagggtagcccaacaagctacggtgagtggtgcgagaagcatggcattctgtttgctgacaagctaattccggtggagtggctcaaagaacccaagaaggaggttccgttcgataaatttaagactaagaaaggagtaaagaaaaatggctaaagttcaattcaaaccacgagcaaccacggaggcaatctttgtgcattgctcagcaaccaagccaagccagaacattggcgttcgtgagattcgtcagtggcacaaagagcagggctggttagacgtaggatatcacttcatcattaagcgtgatggcactgtggaagcgggccgcgatgaactggctgtaggttcccacgtgaaaggttacaaccacaactccgtaggcgtatgcctcgtgggtgggattgatgataaaggtaagttcgacgccaactttacacctgcgcaaatgcaagcgctgcgtagtctgctggtcacgctgctggcgaagtatgagggttcaatccttcgtgctcaccatgacgttgcacccaaagcctgcccgtccttcgacttgaagcgctggtgggagaagaacgaactggttacatctgaccgagggtgataccatgaggatgatttgtattcgctgtgataagccgttgaagagtcgtgtaccgtcacgtcagtgtcagtgcaaagacccaatcaaggcggaggaacacaccgaggaataattaacactcactaaagggagacttaacggtttccctttgttctcgcaactgattaaggaatgtacaatggaacgagaagacgatagtatctttctgtttcatgctccatgtgaaaactgtgggtcttctgatggtaactctgtgtactctgacgggcatgaatggtgcttcgtgtgtgaacatcgagtacccgcaaacgaagagcgtgaagcaaagttatcaacgagaagacgtacaggaggcagcaagcctatgagctatgacgtatggaatttcggtgacagcaacggtcgatactctgacctgactgcccgtggcatctctaaggagacgtgccaaaaggctggctactggctggcgaaagtggacaaccgaatgtatcaggttgccgactacagagaccagaacggctccatcgtgtcacagaaggtgcgcgataaggacaagaactttaagaccaccggaagccacaagagcgatgcgttgttcttgaagcacctctggtctggcggtaagaaaattgtggtcactgagggcgaaattgatgcgctcactgtgatggaactccaagactgtaagtacccggtcgtatcattgggtcacggtgcctctgctgctaagaagacatgcgccgctaactatgaatactttgaccagttcgagcagattatcttgatgttcgacatggatgacgcaggccgtaaggcagtcgaagaggccgcacaggttctcccggctggtaaggttcgtgttgccgtgttgccgtgtaaggacgccaacgagtgtcacatcatgggtgaagacaaagcaatcttggagcaggtctggaacgcgaacccttgggtgccagatggcgttgtctctgcgttgtcactcaaagaccgcgttaaggaagctatgacctccgaggacgctgtaggtttattattcgatggctgtcaaggcctgaacgatagaaccttgggtgctcgtggcggtgaagtcgttatggtcacttccggttccggtatgggtaagtcaaccttcgttcgtcaacaggctctggcttggggcaagcgaatgggtaaacgtgtgggcctagcgatgctggaggaatccgttgaggataccattcaggacatgatgggcttgaacaataaggttcgtctgcgtcagtctgatgaagtcaagaaggctatcgcagaggacggacgtttcgatgaatggtatgatgaactatttggagacgatacgttccacctttatgactcctttgcggaggccgaagctgacaggctgttagcgaagctggcctacatgcgaacaggcttagggtgtgatgttatagtgctcgaccacatatcaatcgtcgtgtctgcctctgaggaatcggatgagcgtaagatgattgaccgcctcatgacgaagctcaaagggttcgctaagtcaactggtgttgtgctcgtagtgatttgtcacttgaagaacccggataagggaaaagcacatgaagaaggacgcgctgtttctattactgacctacgcggttctggtgccctgcgccagctttctgatactatcatcgccttggagcgtaaccagcaaggtgatatgcctaacttggtgttggttcgcctgcttaagtgtcgtttcactggcgacactggaattgctggatacatggaatacaacagagaaaccgggtggcttgaaccgtctagctacactggcgaagaaggagaaggagatactggctggactgaacatgacggacagtcagacttctaaaggatgcccgtgtgggcattccgattgcgatggaatcatgtaccactaattaaccctcactaacgggaacaaccattaaaccataggagacacatcatgtttaaattcattaacgctttaggtaagctggtagttaaactgtacttcatcgaagccaagaagctggacaagaaggccaaagctgattcacagcgagccattgagttggcgaaacagtcccgtgagaaatccgatgcggctgttaatggcatccacaagtcggcagcgattgcagccaaagcacaatccatgagcaaattctttgagtaaggagcgcacactatgagcaagtcaatcacccacgcaaacaccatccgtctgccagacaccgctgaccagttctcccgccgagtacacattaatgtgcgtggtgagaaggtcacgatggtctaccgctggaaagaccacaagtctccgaaagcacacactcaacgcatgaccttggatgacaagcaggtcggtcgcctgatgggtgccctgactatggctgctgacaaggtggtcggtgataaccgtgagcgtctggtagagttcggcgctggtatgcaagagattatcgagaagtgataaactcaaggtcgcccaagggtggcctttatgattatcattcatcctgaaatgaaaggagggcattatgctcgtaagtgacattgaggccaacaacctcttagagaaagtcaccaagtttcactgtggcgttatctatgactaccgtgatggtgagtatcatagttatcgtccgggcgacttcggggcgtatctggatgcgctggaagccgaggtgaagcgaggtgggcttattgttttccataacggtcacaagtatgacgttccggctttagagaaactcgcaaagctgcaactcaatcgtgacttcaagttaccccgtgagaattgtattgacacattggtactctcgcgtttacttcatgcgaaccttaaagacacagacatggggcttcttcgttccgggaaactacccggtcgtcgcttcgggtctcacgctctggaggcatggggttatcgcttgggcgagatgaaaggtgaatacaaggacgacttcaaggctatgctggaagagcagggcgaagaatatgttgatggtgccgagtgggtttcattcaacgagccgatgatggcgtataacgttcaagacgttgtggtcactgtcaagctcttcgagaaattacttagtgacctccactacttccctgcgggtatggacttcacgaagtacgatgcggatttattctggcgtgaagctggtgagtctgtggatattgaacatcgtgcagcgtggcttttagcgaagcaggagcgtaacggcttcccgttcaacaccaaggccattgaggaactttatgtagaactggcagcgaaacgcgccgaacttctgcgaaagttaaccgaaacgtttggctcatggtatcaaccgaaaggtggtaaggaactcttcaagcacccacggacaggcaaaccacttccgagttaccctcgcgtggtctatccgaaacagggtggcgtgtacaagaagcctcgtaataaggcacagcgcgaaggtcttgagccttgcgacttggacacgagggattacatggagggtgctccatatactccggtcgagttcgttacgttcaagccaagtagccgtgaccacattcagaagaaactacaggaggccggatgggttcctgagaagttcaccgagaagggtgcgcctgtggtggacgatgaggtcttggagcatgtacgagtggatgaccctgagaagcaggcgtgcattgacttgattaaagagtacctgatgattcagaagcgaatcggtcaggcggcagaaggtgacaaagcgtggttacgttatgttcaagatgatggtaagattcatggagccgttaaccctaacggtgcagttactggtcgtgctactcatagtttcccaaaccttgcacaagtacccggcgttcgttctccttacggggagcagtgtcgtagcgcttttggtgctgaacatcatttggatgggattactggcaagccgtgggtgcaagcggggatagacgccagtggcttagagttgcgctgtctggcgcacttcatggctcgtttcgataacggagagtatgcgaatgagattctcaacggtgacattcacaccaagaatcagaacgctgcggaactcccaacgcgagacaacgccaagaccttcatttacgggttcctttatggagcaggagatgagaagattggtcagattgttggggctgggaaggagcgcgggaaggaactcaagaagaaattcttagagaacaccccggcgattgcagcattgcgagaagctatccaacagtctctcgttaagtcttccgcttggattggtggtgagcagaaagtacagtggaagcgccgttggattaaaggtctggatggtcgcaaggttcacgtcaggtctccacacgcagcgctcaacacattgttgcagtctgctggtgctctgatttgtaagctgtggattatcaagaccgaagagatgctcattgagaaaggcttgaagcatggctgggatggtgactttgcgtacatggcttgggttcacgatgagattcaggtggcctgccgtacagagcacatcgctcagattgttattgacaccgcgcaggaggctatgcgttgggtcggagagcattgggctttccgttgtcgtttagataccgaaggtaagatggggccgaattgggctgtctgccactaacagtaggagaaacattatgggtatgaacaaacaactcaaagtaactttcaacgtgaccgcaaccctgagtgatgagcaggaagcggagttcgtgcagacgctgaaagagatggcgaaaaacccgaagcgtgggccttacttcgacaacattctggtagccgctctgactcatgggccggagggtgcctttgagcagatgctgaaacagggtcttcgtgagttcgtcaaggaagaacttggcaaagagtgtgctcgttcagtcgatgagttcatcctcaaggttgccccagcgaaagtggaggttatccgatgagtgaatacctgaaagttctggcagctatcaaaggttgccctaagtcctttcagtcgaactatgtgcgaaacaatgcggctctcgtagctgaggccgcttctcgtggacacattagctgtttgactgtgggtggtcgcaatggtggagcatgggaggtcacagccgctggtgtgcgcttcctgaaacgaatgggaggttgcgtatgattatgccaaagagtgacaccgtaacgatgacccgtgacgcgtggaacgatgttagcgcatacattgataagctggagaaagacctagagttcctgaacgcgcttaaggcgtgtggtgtggataattgggacggatactctgatgcagtcgagatggtttacggggaggatgacgaatgagcctaatcacattgaaagacttcgcggagatgcgtgaaggtaagcctgtggagaagggagtgctggtcatggatggtgactggttggtatatcagtcaatggctgctgccgaagttgagacggattggggggacgacatttggactcttgagtgtgaccacgccaaggcacggagcattctcgattctgcaatcgaatcgtaccgaacccgtaagaaggcttggagtgacgctatggttgttctggcgtttaccgacgatgtgaactggcgtaaggtactggttgatgagacctataaggagaaccgtaaggcgacccgtaagcctgtgggataccgtgacttccttcaagctctgtgggagcgcgatgagttcattcacatcaaagaggacatgcttgaaggtgatgacgttatgggcatcattgggtctggtcacgaggtcttcggcttcaagaaggctgtgttggtctcctgtgacaaggacttcaagactatcccggacgttgacttcctgtggtgtaccactggtaacatcttgacgcagaccaaagagaccgctgattggtggcatctcttccagactatcaagggcgatatgaccgatggctactccgggattcccggctggggcgatacggcagaagccttcctgaatgacccgttcattgtggagcctgtggagtccgtgttgaagtccggcaagaacaaggggcagacagtaaccaagtgggtgaagcgtgctcctgatgcgactgagacgctgtgggactgcattaaatccattggtgccaaagctgggatgaccgagcaggaaatcatcaagcaaggccagatggcccgcattcttcgcttcgaggaatacaattacattgacaaggagatttacttatggacgccgcaaagtacataaccatcgctgtgctggtaggtatgctggcgcgaggtctctggatgttcactctcatagtccgagacgtgaagcgagactccgagattaagtgataaactcaaggctctctgtattaaccctcactaaagggaagagggagcctttatgattattactttaagacttaaccttaagaggtgaaattatgttacaaccaattaatcatgttttaactcatcccgatgatattcctagtatgcctcgtgcagctaaagagtatctacaggtgcgcttcaatcagacctatgtgatggagtccggggagtaccgtgcgctccgcgctgcgggttactctgagtctttcattgctggtgtgatgcatggtctgtaccttgcctctcgaacacttgatgagattgaggtgcgtaaagagcaactgagacaggagtaattatatgtgctggaaaccgaaggtgaaagtccctaagatggacactaaccagattcgcgctgccgaaccagcacctttgactgagccaccgaaatctgtggtatggggaggcgatgacgatgaggacaccagcgtgtcttcctctgaggttccaaccacacagagcagcggtaagagcagtctcaaggtaaagctggatgacagcgcagccaagaacaagagtaaatcctccattcgctccaaggcgtttgggtaactgagtaataacataggggacacattatgggattcttcaagaaaatcaagaaagccgttaagaaagttgtgaaggaagttagtagaccagtcgagaaggcaggtaaggaagtcggtaaagtcgttggcggtgcgctgggtgctggtaagcaggagattatccaacaagaggctccagtaccagtagtgactgcgccgcctccagcacagattgtagatgtacccgaacaggataaggctgagggtgaggatgaggcgcaaaccgaaagcgcacgtaagaaagcacgcgctggcggtaagaagtctctgagtgtagcccgtagctccggcggtggcatcaacatctaaggaggactgaatggctgattcaaaacgtacaggcttgggcgaagacggtgctaaagctacctatgaccgcctaacgaacgaccgtagagcctatgagactcgtgcggaaaactgtgcgcaatacaccattccgtccttgttcccgaaggagtccgataacgaatctaccgactacacgactccgtggcaggctgtaggtgcgcggggtcttaacaatctggcctctaagttaatgcttgcgttattcccgatgcagtcgtggatgaagctgaccattagcgaatatgaggcgaagcagcttgttggagaccctgatggactcgctaaggtggacgaaggtctgtctatggttgagcgtattatcatgaattatatcgaatccaacagctaccgtgtgacgctctttgagtgcctcaagcagttgatcgtggcaggtaatgcactgctttacttaccggaacccgaaggtagctacaatccgatgaagctgtaccgattgtcttcttatgttgtccaaagagacgcatacggcaatgtgttacagattgtcactcgtgaccagatagcctttggtgctctcccggaagacgttcggtctgcggtagagaaagctggtggtgagaagaagatggacgaaatggtcgatgtgtatacccatgtgtatctcgatgaagagtccggcgattacctcaagtacgaggaagtagaggacgttgagattgatggctccgatgccacatatcctactgacgctatgccctacattccggttcgcatggttcgcattgatggcgagtcttacggtcgctcctactgtgaagaatacttaggtgacttaaggtctcttgagaatctccaagaggctatcgttaagatgagcatgattagtgcgaaggtcatcggtctggtgaacccggctggcatcacgcagccccgtagattaaccaaagctcagactggtgacttcgttcccggtcgtcgagaagacattgacttcctgcaactggagaagcaagctgactttaccgtagcgaaagctgtgagtgaccaaatagaagcacgcttatcgtatgcctttatgttgaactctgcggtacaacgaacaggtgaccgtgtgaccgccgaagagattcgatacgttgcgtcagaactggaagatacgcttggtggtgtctattcgattctgtctcaggaactgcaattgcctctggttcgtgtgctcttgaagcaactccaagcaacctcgcagattcctgagctacctaaagaagccgttgagcctactatcagtacaggtctggaagcaatcgggcgtggtcaagacctcgataagctggagcgctgtatctccgcttgggctgctctggctcctatgcagggagacccagacattaaccttgctgtcattaagctgcgcattgctaacgccattggtattgatacttctggtatcctactgacggatgagcagaagcaagcccttatgatgcaggatgcagcacaaacaggtatcgagaacgctgccgccgctggtggggctggtgttggtgctctagcgacctcaagcccagaagctatgcagggtgccgcagcgcaggctggcctagacgccacctaataaccctcactaaagggagacctcatctttgaaatgagcgatgactaaaggttggagtcctttggtttccctttatctttaacaacttaggagatttaacaatggctgaatctaatgcagacgtttatgcgtccttcggtgtgaacaacgcggtaatgaccggaagcacacctactgaacacgaacagaatatgctgagtctcgatgttgctgcccgtgatggcgatgatgcaatcgtacttagcgaggaaccgagttcccataacgatgacccatatgcatccggtgtagacccgttcgctgatggtgaagacgatgagggccgcattcaggttcgtatcagtgaagatggtaatgaagccgagtttgacactggtagcgataacgctgaggttgagaccgaaggtgaggccgctgagtttgaaccgctgggtgacactccagaagaactgagccaagtgactgaacaattaggtcagcacgaagaaggctttcaggcgatggtcgagcaggccgttgagcgtggactgagcgcagagtctgtgactcgcatctacgaagagtacgaatccgatggtatctctgagaaatcctacgcggaactcgaagctgctggctatagtcgtgcctttgtggactcctacatctccggtcaggaagcccttgtagaccagtacgtcaatcaggtagttgcctttgctggtggtaaggagcgctttagcgcaatccatacgcaccttgaagcaaccaacccggctgcggctgagtcccttgaggctgccatgatgaaccgagacttggcgactgtcaaggcaattatcaatctggctggtgagagttacacgaagaaattcggtaagcctgccaaccgtagtgttaccaagcgtgctactccggttaaaccagtagctcgtcagaaagagggctttacgaatcaggctgagatgattaaagctatgagcgacccgcgctatcgtagcgattctgcctaccgccaaatggtagaacagaaggttatcgactccagtttctaattaaccctcactaaagggagagaccatagatgactacaatggttgaatcacctgagcacagaactttgtggtcactcccgtaggtgaaacattgagaaccaactcgattcaagtagtaaccaaacttttctttaaattaacataaggagattcaacatggctaacattcaaggcggacagcaaattggtactaatcagggtaagggtcagtccgcagcggacaaattggcgctgttcctgaaagtgttcggcggtgaagtcctgacggctttcgctcgcacctccgtgaccatgccgcgtcacatgctgcgctctattgcttctggtaagtccgcacagttccctgtgattggtcgcaccaaagctgcttacctgaaaccgggtgagaacctcgatgacaaacgtaaggatatcaaacacaccgagaaggtaatccacattgatggcctgctgactgcggacgttctgatttacgacattgaggacgcgatgaaccactacgacgttcgcgctgagtacaccgcacagttgggtgaatctctggctatggcggctgacggtgctgtactggctgaactggctggtctggttaacctgcctgacgcctccaatgagaacatcgagggtctcggtaagcctaccgtactgactctggttaagccgacctctggcgacctgactgacccggttgagctgggtaaagcgattatcgctcagttgaccgttgctcgtgcggcgctgaccaagaattacgttccggctgctgaccgtactttctacaccactcctgataactactccgcgattctggctgccctgatgccgaacgctgcaaactatcaggcactgattgaccctgagcgtggtactatccgtaacgtgatgggcttcgaagtggttgaggttccgcacctgactgctggtggcgctggtgatacccgtgaggattccccggctgaccagaagcacgctttcccggcgacttccagcactaccgttaaggttgctctggataacgttgttggcctgttccagcaccgctctgcggttggtacggtcaagctgaaagacttggctctggagcgcgctcgtcgtgcgaactatcaggctgaccagattatcgctaagtacgcgatgggtcacggcggtctgcgtccagaagctgctggcgctatcgttctcccaaaggtgtcggagtaattcccgaccccactggagttactcttagtcagaagactatgagcttagtcgttggggcttctaaagccctgactgctacggtaactccggctgatgcagtacagacagtgacctttacgtcttccgatgcgaagattgctacggtcgatgcctctggtactgtaactgctgtgggcgctggctccgctgacatcactgctactactgtgaatggcctgacggctgtctgcaaggtcactgtgaaagcagtagagcctcccgtagaaggctaaggtctttaccggggatttactttccttcattactttatgaaccccttgggtgccctctgagggtatctgaggggttttttgctttaaaccctcactaacaggaggtaacaccatgcgctcttatgagatgaacattgagaccgcagaagagctatcagccgtcaacgacattctggcttccatcggtgagccaccagtatcaacccttgagggtgatgcgaatgctgacgttgcgaatgctcgacgtgtactcaataagattaaccgacagattcaatcacgaggatggacattcaatattgaggaaggtgtgactcttctaccggatgcgttctctggtatgattccatttagctctgactatctgtccgtaatggcaaccagcggtcagacccaatatatcaaccgtggtggatatctctatgaccgctctgcgaagactgaccgatttccttctggtgttcaggtcaacctgattcgtctgagagagttcgatgagatgcctgagtgcttccgtaactacatcgtcaccaaggcttcgcgccagttcaacaaccgcttcttcggtgcgccggaggtagacggagtgttgcaggaagaagagcaggaagcgtggcgtgcgtgcttcgaatacgaactagactacggcaactacaacatgctggacggtgacgcattcacctctggtctacttaaccgctaatcataaggaggctctatggctctcattagccaatcaatcaaaaacctcaagggtggtatcagccaacagccagatattctccggttcgctgaacaaggtagcgtacagattaacggttggtcttctgagtccgagggtctccagaagcgcccaccgatgattcaccttaagacccttggcgctgctgggtatgtgggtgcgcaaccttacgtgcatcttatcaaccgtgatgagttcgagcagtatttcgttgtgttcactggtgaagacattaaggtgttcgacctcgatggtaaggagtatctagtacgtggagaccgctcttatgtgcgcacagctaacccacgggaagaccttcggatggtaacggtggcagactatacctttgtgactaaccgcaaggtggttgtgcagagtaacgaccaatcggtcaaccttccgggctttaaagaccaaggcgatgcgctgattaatgttcgtggtgggcaatatggacgtagactctcaatcgagttcaacggggctgagcgtgctgctattcaactaccagacggctcacaaccagcacacgtcaatgaggttgacggtcaggccatcgctgagaagctggcggctcagttgcggaataacctagggaatccaaacaatgaacaagacccaaataagtggcggttcaatgttggccccggattcatccatatccttgcaccaaataacgataacgtttggggactacagactaaggatggttacgcagaccagctaatcaaccctgtaacccattacactcagtcgttccagaagttgcctattaacgctccagatgggtacattgtgaagattgttggtgatacctcaaagactgccgaccagtattacgttaggttcgacctcaaccgtaaggtgtgggtagaaacaattggatggaacacaaggactcacctacattaccacacgatgccttgggcgctggtacgtgcttctgacgggaactttgacttcaagtaccttgagtggggtgctcgtactgtgggcgatgatacaactaacccatacccatcatttaccggacagacaatcaacgatattttcttcttccgaaaccgtttgggattccttagcggggagaacatcatcttgtctcgcacctcgaaatacttcaacttcttcccggcctccgtgtcaaactactccgacgatgacccaatcgacgttgcggttagtcacaaccgggtgtcaaccttgaagtatgccgttccgttctccgaagagttgctcctgtggtctgaccaagcgcagttcgttctgacagcctctggtatcctatcgagccgctccgtagagttgaaccttacgactcagtttgatgtgcaagacagggcgcgaccacacggtgtggggcgtaatgtatactttgcgtcacctcgcgcttccttcacatccattaaccgatactatgcggtacaggatgtaagctctgtgaagaacgcagaggacatgacggctcacgttccgaactacataccgaatggagtattcagtatatcgggtacaaccgctgagaacttcgcggctatccttacgagcggagcaccgaaccgagtgtatatctacaagttcctctatattgatgaggaaatcaggcagcagtcgtggtctcattgggactttggggacaacgttacggtgtttgcagcacaggtgataaactcaacaatgactgtattgatgggcaatgaacatgctgtgtggatgggacgcttacacttcacgaagaactccatagacattccgggagagccttacagactgtacatcgacgctaagagaaggtacaccatccctgctgggacatacaatgacgatacctaccagacgtcaataagcctctcagcgatttacgggatgaacttcacgaagggtaagatttcggtggtctttcctgatggtaagattgtagagatagacccgccagtcaacgggtggagtagcgacccggtgttgcgacttgatgggaaccaagagggccaagtggtttacattgggttcaacatcccgttcacttatacgttctcgaagttcctcatcaagaagaccgctgaggacggctcgacggctactgaggatatcggtcgcttacagcttcggcgtgcatgggtaaactatgaggactctggagcgttcatcatccgtgtgaacaacctgtcccgtgagttcatctacacaatggcgggtgcacgattggggtctgacaacctccgtgttggaggctcaaacattggtacagggcagtaccgcttcccggtggtaggcaatgctcaggcgaacatagtaactatcgagtcagacgcatcaaccccactgaacatcattgggtgcggatgggagggtaactaccttcgtcgttcttctggcatttaacttaaagtctccctgcggtgaattaaccctcactaaagggagacactaatagatacgaggggttaaagcattatgtatattacaaagtgtttacaaagccacgctgacaactttcagccgtccatagaggacattctggaagctgaggcattgggtgtcgaacctaaagtaattcctgatgagaacactgtggcaatgctcagcgataacgctgtgttggcaatcggtggcaatcagggagaccgagtatggttccttacctctaagtacgtcccgctgtttaacttgaaggagcgcttagagtttcgtagacttatcattgaatatcgtgatatgatgctgagccagtacgagtccatttggaatttcgtttgggtaggcaataagtcacacattcgtttcctaaagaccataggtgcggtattccataatgagtttatcgctgatggtcaattccaattattcactatcagtaggaggtaactatgtgctggatggcagcgattcctatcgccatgatgggtgcccaagctctgagtagccagaacagtgctgacaaggcgcgagtggcacagaccgaagctggacgcagacaggcaatggagatggtcaaagagacgaatatccaaaatgccaacgcctcgctggaacaacgggacgcccttgaggctgcatcctctgagttgactacacgtaacatgcagaaggtacaggctatgggaacaatccgtgcggcgattggtgagggtatgctcgaaggtgaatccatgaagcgcatcaagcgtatcgaagagggcaactacattcgagaggccaatagcgtcaccgagaattaccgccgagactatgcgagtatctttgcgcaacagttgggacgcactcagtccacagcaagtcaagtcgatgccatgtacaagagcgaggccaaaggtaagtctggtcttatgcgcgtactagaccctctgtccattatgggtcaggaagctgcaagtcaatatgcggctggtggatttgacaagaaaggcggaaaccaagcagcacctatcagtgccgccaaaggaaccaagaccgggaggtaataatggctagtaaactaaatagtgttttaggcaacatggcgactcccggtatggaacgactccggggcgtcaaaggtatggactaccgggcagcaaccattcaggctgaacaaccaagagcgagtcttctggactccattggtcgattcgctaaggctggtgccgatatgtacatggcgaaagatgaacgtgataagcaacgggccgatgagcgctccaatgagattatccgtaagctgacccctgagcagcgccgacaggctatccagaatggtacactgctgtatcaggatgacccatacgcaatgcaagccttgaagttcaagaccgggcgtaacgctgcgttcctcgttgacgatgaggttcaacaggccatcaaagagggccgcttccgtactcgtgaagagatggagcagtatcgtcactcacgcctacaggagcactcgaagtcgttcgctgagcagttcggcatcaatgagatggacgaggaataccagaagggtttcaatgcgaatatcaccgagcgtaacattgctctgtatggcgcacatgattccttcctgagtgaccaagcgcagaagggtgcaatcctgaactcgaaggttgaactcaatggtgtcctgtctgaccctgacctactgtctcgtcctgagtccggtgagttcttccagaactacattgacaactccttggtgacagggatgaccgacaatcaggctcaacaggttatctcttcgtccctgaatgacgtgctacagcgtccgggcggtgccgccttcttgcagaacattgagaaccgcaaggtgactcttaatggcgctacgactacctatcgtgaactgatgggtgatgagcagtggcaggcaatgatgattaaggcacagcacactcaattccagaacaacgcgaagttaacagagaagttccgactggatattaactcagcgcttaaccaagcggacactggtaaaggttgggagactcttcaaggtatcaaggccgaactcgataagattcagccgggtgaagagatgactcctgagcgcgagtggttgatttccgcacaggaacagatgcgcacccgcttcaagcaggaacaagctgagacagccaagctgatggacaagcaacagaagaccctgaataaatctttggtcatcgacaagcagttccagaagcgcctcaacggtgaatacgtctcgaccaactataaggacatgccgacaaacgagaacactggtgagtttacacatagcgatatggtcaactacgcgaaccagaagttagcggaaatcgaagcgatggacttaacgccagaacagaaagacaaactgaaattggactacctacgggcagactccaaggagggtgctttccgtgcagcgtttggtgagatgattactgacgcgggtaacgaatggcaggctgcggtgattaacggtaagatgcctgagagcacaccagcgatggacaaccttcgtcgcatccgcaacactgaccctgacctgattgcctctctgtatcctgacaaggccgagttgttcctgacgatggacatgttggataaccaaggcatcgacacgcaggttcttatcgacgctgataaggcccgcgcacagaagaccaaggagatgcagtttgaggatgaccgagcgtgggctgctatgatgaacgattcaacgaatcctcaaatcaagtacatgccttcgagtgtccaagggtatgcccggaagatttatgattccgtgaagtaccggacagggaaccctgacatggcaactgaacaggtcgcaaagttcctctccgattctacgaccacgttctccagtagcgatgttgagggtgatacctacggcgtcctaccgaagaacatcctgactgtttcggatgaccctaagtcgtgggagcaagggaagaacattctggacgaagccattaagggaatcacagcggcgaacccttggattaccaacaagcaactgtcggtgtaccagcaaggtgattcaatctacctgatggacacaaccggacaggttcgcattcggtatgaccaagagttgctcaagcgtgagtatcagcgcaccgcacagatgcaagctgaggcagcgcgagagaaagctctcaaagaggccaataagcgtgctccaatcagtcgcgcaacgcaggcgcgtgaagaagcgcgtaaacgtgtccaagagaaacggaagaagactccgaagtacatctatgggcgtaaagaagactaacagtgataaggaggctccatgagctacgataagaacaaacctagcgagttcgatgggttatttcaaaaagcggcagacaatcatggggtctcctatgacctgcttcgtaaattagcattcaacgaatccagctttaatccaaaggccaaatccccaactggcccgaagggtctcatgcagttcaccaaaggtacagccactgcgcttggcctcaaggttactgacgatgatgacgatgaccgttacaaccctgagttggctgtggatgcagccgctcgtcacctgagtgacctcattcggaagtacgatggggatgagcttaaggcagccctagcatacaaccaaggcgaggggcgcaacggtgctccacagatacaggcctacgacaaaggtgattgggcttcaatctctgaggaaggtcgtaactatatgcgtaacctgatggacgtagctaacagtcctcgcaagggggacttggaggcgttcggcggtatcaccccaaaggctaagggcattccatcgggggatgcatttgctggaatcgggaagaagcagacggtaggcactgacctgccggagtcaactggattcaaagtggagggtaaagagcagaaagcacctaacgtgccttatgccaaggacttttgggaaaagactggaacaacgctggacgagtttaattcacgttcgaccttcttcggaatcggagatgccacgagtgcagaacttcacaactccgtattgggtgtggcttttcgtgccgctcgtagtgatgacggttttgatttattcaaggacaccattactccgactcgctggaacagccatacgtggactccagaagagctagagcgtatccgtaaggaagtgaagaacccatcgtacatcaacgtagtcactggaggctctcctgagaatctggacgccctcattaagatggcgaatgacaactatgagatggacgcacggtctgccgatgctggtgttggtgccaaacttactgctggtatcgtcggtgctggtgtagacccgctgagttacgtgccgctagtaggcgtagccgggaagggtctcaaggtggttaacaaggctttcattgtgggtactcaaagtgctggcctcgcggttgcctctgagggtatccgtacatcaatcgctggtggagaagcccactatgctgatgctgctttaggcggtctgatgttcggtgctgggatgagtgcaataagcgatgctatcgcggctggtattcgccgttcccgtggtactgaggttgttaatgacttcgctcctatggcacaccgattggaagcccgtgagaccgctctgaactctggtggtgaagacctgacccgtatgccgagcgagaaccgtgtgttcgaccgtgagcacgctggcgttgagtattcacctctggagaccgagccgggtgccgttgtgttgcctcaaggtcaaatccttagcgacaccaacccgctgaaccctcagactcttagcgagttcgaggcggtcaaccctgagcgtgcctctcgtggtatctctttgggtggcttcactgagattggattgaagactctccgctctgagaacccgactgttcgctccattgcgagtgaccttgtgcgttctccgacagggatggaatcaggctctaatggtaagttcggtgcgacagcttctgacattaaggagcggctccacgcgaacaatcagcgcacctacaatcagctttatgatgctgtgcgtactgcaatgaaagaccctgagttctccacgggtggggccacaatgagccgtaaggaaatccgacaggaaatctacaagcgtgcagccttggcgattgagcggcctgagcttcaagcaaacctgacaaggggtgagcggaacgtgatgaacatcctcaagcagcactttgacctcaaacgtgaaatcatggagaacccgtcaatcttcggcaacaccaaggctgtcagtatcttccccggctcacgccacaagggaacctacgtgccaaacgtgtacgaccgcgctatcaagattgagatggttaaacgttacggtaatgatggcttgcagcgagcaatcgcggagtcatggttgacgtcttatcgtgctcgtccagaagtcaaggcgagggtcgatgagtacctgatggaacttaacggtctcaaatccgttcaggaagttacacctgagatggtgcagaagcacgcgatggataaggcgtatggtatttcacacactgaccagttctctgcctcctctgtcattgaggataacattgagggtctggtgggtatcgagaacaacaacttcttggaagcccgtaacatgttcgacagtgacatggcggtgactctccctgatggtaacacgttctctgtgaatgacctgcgtacctatgacatggctgaaattctgcctgcatacgaccgacgagtggatggggatgttgcaatcatgggcggttccggtaagactaccaaagacctgaaagatgaaatcatggcgctggataagcagtcagagggtaacggcacactgaaaggtgaagtggaagccctcaaggacaccgtgaagattctgactggtcgcgctcgaaggaacccggaaggcgcttggggcacagccctacgctccgtcaatgaccttacgttcttcgctaagaacgcctatatgggcgcacagaacgttactgaaatcgctggtatgctggcgaagggtaacgtctctgcgataactcatggcatccctatgattaacgattgggtcaaccgtggtaaaccgcttcgtgcctctgagattaaggagatacacgggatggtgttcggtaaggaactagaccaactaatccgtccgggacgtgaagaccacgtgcgccgactccgggagtctactgacaccagcgctgcggttgccaatgtggtcggtacgattcgtttcggcactcaagagttggctgcacgctctccttggacaatgctcctaaacggaacatcaaactacattcttgatgctgcccgtcagggtgtgcttggggatgtggctggagcggcccttgctgggaaagcctctaagttcggtaaggcaaactaccttaagtctgcctctatcagccctgagcagtggcgtggaatcaagcagttgttcagagaccatgcgactcgtggagaagacggtaagttcaccattcgtgacaaacaggctttcgctaacgacccccgttcaatggacttgtggcgactggctgacaaggtggctgatgagaccatactgcgccctcacaaggtttcctcacaggactccaaagcgttcggtgcaggggtgaagatggtgatgcagtttaagaacttcgtcatcaagtcccttaactcccggttcgtccgtagcttctacgaggcaacgaagaacaaccgtgcgttagaccaagcgttgactcatatcatctctttgggtctagctggtggttactacgttgcgcaggcgcaccttaaggctgcaagtctacaggagcacaaacgtaaggagtaccttaagaacgcccttgaccctaagatgattgctcatgcgtcaatatctcgtagttcacacttaggctcaccattgagtatctacgacatgttcgccgggatggttggtagcgatacctataagtacacccgctctacggtgctccctaaagagtccgagaagcgtgaccctaacaaggcagtgacaggtagacaggtggcttcaactatcgcaggtgcaattggtgagcaggttccgggtttaggctttgttggctctgtgggtgcaacagctattaacgccgcttccctgctgtcttctccgaacaaggctaccgctctggagttccgtacaggcctcttcaacacctctcgtgagttgattcctaatgacccgctatcgcagcaactcattatgaaaatctacgaggccaacggtatccgcataaaggagacgccgaagaaacaataaaccctcactaaagggagagaggtcacattctggcctcttctctcctaatgctaatttataaaggaggtcacatggctacaactattaagaccgtgatgacttacccgctggatggctctactacggactttaatattccgtttgagtatctggcgcgtaagttcgtcagagtgacccttatcggtgttgaccgaaaggaactcatcttgaatcaagactatcgttttgcgactaagaccacaatctccacaacgagagcgttggggccagcggacggttatactttgattgaaatccgtagattcacctccgctaccgataggctggttgactttacggatggctcaatcctccgtgcgtatgacctgaacatctcgcaggtacagaccctccacgttgctgaggaagcgcgtgaccttaccgctgatacgattggcgttaacaacgatggtgacttggacgctcgtggtcgtcgtatcgtgaacgttgcggacgctaaagaccccggtgatgcaataactttaggtcaagtctctcgatggaatgagtcggcactgaactctgcgaatgctgctgctgcatctcaacaggccgctgctgcatctcaacaggccgctaagtcctcagagactaacgcaaagtcctctgagagcaacgcaaagtcctcagagaccagcgcgtacgaatgggcgcagcgtgcagaggactctccggtgcagggtagcgagttctcctcatatcactactcacgcaaggccgcaaaaagtgcaacagccgcgcatacgtctgagaccaacgctaagtcctctgagaccagcgctaagtcctctgagactaacgctaagacctctgagactaacgctgcatcgagtgctgctaaggcttctgaggaggctgctaagctgactaacatgaatgactttgctgctgctattgattcagtcaacggtaacaatgttgtcatgaagggtgacttcaccattaaaggaaacggtaaagtatcaatactgaaccacagtgggctataccaagataagaccgtgaacggcgtgaactatgccaacaggatttatatggatgatgcagggggcatgcacttcgagaactaccgtgtgtctggtacttcatccaccttacgtgctggttttgttattacagataccaacaggtttgactttacagggccaacgcgagctaatggtgatatcatcgcatatgtgaatgcgccccctaatccagctattggccaatacctcaattctgtggcagttcgctcacagcttcggggccgtggtgctaagaatgatccacttggtgcgtactgtggtatgtatattcaggagcacgttggtacagaccacgcgataatccttaacctcaatggttatagcaaggatactaactggcagctattctccaatggtaaaatatctacaccacttggtgatgtgatgacttcgggttctgatgttagaatcaaggatgatatcactaaacctcttgatggtgctggtgagcgtattgacgcaattggcatagtggaatacacagagattgccaccggggaacgtaaacgtgggtggctggcccaacagcttgacacgattgacccgctgtacacatacctcacgaccaccgcagaaggtagtcttttgaataccaacgacagggcgttgcttgctgacgtaataactgagcttcaagcactgcgtcaacgtgttaaagaactcgaaggacaatcaacaaagccagcggacggcacaacataaggagaacaagaatgttatcttttgacttcaataacgaggtcgttaaggctgcgcctattgttggcacaggggtcgctgatggggcggcccgactcttttgggggctatcgttaaacgaatggttctacgttgcagctatcgcctacacagtggttcagattggtgccaaggtagtcgataagatgattgactggaaacgtgcaaacaaggagtaacctatgagcgacaagactttaatcaagctgctggagatgctagacacggagatggcacagcgtatgcttgctgacctccagagcgaggaacgccgaacgccacagctttacaacgcaatcggcaagctgttagaccgccataagttccaaatcagtaagctgaccccggatgagaacatccttggaggtctcgcggctggtctggaagactacaacaaagtggtcggccctaatggtctgactgacgatgagactatcacgctacagtaagtgacatactcaaggttctccgcgtggggagcctttatggatgttatttggtgcatctacgtgaaatctgaaaattgatgggaggtgttatgctaaaacttttacgcagcgcactcccttgggtactcgccgggacactctttatgggtggctggcacttagggtcaacccatgagagagcaaactggaaggaggtaatccaaaatgaatacattgcgaaaacaaaagcaaccgcagcaactcaggcagaggtcagtcgggtatcccgtgagtaccaagaagagattgcagccattgagggcagcactgataggatgcttaatgaccttcgtagtaataataagcggctgtcagtccgcatcaaaacccttaccggactaccagaagataacggtagatgcgagtttaatggtcgagccgaactacacgagtcagatgctaagcgtattatcggaataacccaagctgctgatgctcacgtaagagcgctccagcgtactattaaggagatgcagaatgagcgacacccaagcaaaccgtaatgcgctaatcatcgcgcagcttaagggcgactttgtggccttcctgttcgtattgtggaaggctttggctctcccgccaccgactaagtgtcagattgatatggcccggtgtctggctaacggagacaacaagaagtttatcctacaggctttccgtggtatcggtaagtcattcatcacctgtgcgttcgttgtgtggacgttatggcgtgaccctcagttgaagatactgattgtctctgcatccaaagaacgtgcggacgctaactccatcttcatcaagaacatcattgacctgctgcccttcttggctgagctaaagcctcgccccggtcagcgtgactctgtgattagtttcgatgttggccctgccaagcctgaccactctccgtctgtgaagtcggtgggtatcactggtcagttgactggtagccgtgctgatatcatcatagcggatgacgttgagattccgtctaactccgcaactcaaggtgcccgtgagaagctgtggactctggtgcaggaatttgctgcgcttctgaaaccgctgccgacttctcgcgttatctaccttggcacgcctcaaaccgaaatgaccttgtacaaggaactcgaagataaccgtgggtacaccacaatcatctggcctgcgctctatccgcgtagccgcgaggaagacttgtactatggcgaccgtctggccccgatgctccgcgaagagttcaacgatgggttcgagatgctccaaggtcaaccaactgaccccgtgcgcttcgatatggaagacctgcgtgagcgtgagttggaatacggtaaggctggcttcactttgcagttcatgctcaacccgaacctgagtgatgccgagaagtaccccttacgcctccgggacgctatcgtgtgcggtctggacttcgagaaagccccaatgcattaccagtggcttccgaatcgtcagaatcgcaatgaagagctacctaacgtgggccttaagggtgatgatattcatagctatcattcgtgcagccagaacactggacagtaccagcaacgcatcctcgtgattgaccctagtggtcgaggtaaggatgagacaggttacgcagtgttgttcaccctgaatggctacatctatctgatggaagctggcgggttccgcgatggttattccgataagacccttgagtccctcgctaagaaagcgaagcagtggaaggttcagacagtggtcttcgagagtaacttcggggatggtatgtttggtaaggtattcagccctgtgctcctgaaacaccatgcagccgctatggaagagattcgcgctcgtggtatgaaggaactacgcatttgtgatacgctggagcctgtactctctacgcaccgccttgtgattcgtgacgaggtgattcgtgaggactaccagactgcccgtgacgctgatggcaagcatgacgttcgctattcgctgttctaccagttgacccgtatggctcgtgagaagggcgctgtggcccatgatgaccgacttgatgcgttagcattgggtgtggagttcttgcgctctacgatggaactggacgccgtgaaggtggaggctgaggtgcttgaggcgttcttagaggaacacatggagcacccaatccattcggctggtcatgtagttacctctatggttgacggtatggaactctattgggaggatgacgatgtgaatagcaacaggttcattgactggtagttatgcatattgagcgcataaggattcaattagaccacggatggtcactttaagaaattccttaagaatcaacgagtttgcattaaccctcactaaagggagagaggggacttaaagctactatataggttagtcattcaggttatgcaatgaccccttatgcactttaagtctacctctgtgattggtgatattatcattgtataatcaccctaccttagagcaactgaaaggaggtggctcatgttacgcttgctgattgccctgctgcgtcatagagtcacttggcgatttcttctggtacttactgctacccttgggtacgcaggtcttaatgaccacctcggtcaactggaagtggccttttgctctatactctcttgtggggattaaattattgttgatgaacgacaagcggctctgagggattcgtaggtatagtttcactacaccaactcatccctgtagagtcaaccctaaaggttatacctaaagatgccctgtagttcgtaatggtcttacagggtcttctggtgtctcctagctatcccttcgggatgcgcctatggtctcacctatggtgtggccttacctaaagtggttgcctaaagagaccctttaagaatttaccacaaaaatctgaatgggtatctcacagttcaagaacccaaagtacccccccatagccctcttaaagccacctaaagccagccctacccctagggtttaaccttcggttaaccttgggtatctctccaagtggtctataggatagcctaaagtgatgcctaaagtcaatacctaaagtggtggatggcttaaggaggacttagagagtgtcctagtgtaccagtgcgatagtacatctctatgtgtccct

SEQ ID NO: 25 - DNA, 39088 bp, Unknown
  source: /note="Description of Unknown: KP2W-P0105 Bacteriophage sequence"
gtaacccttaaggctattattcatctcgtcaacgggacaacggccttaaagccactccctgagataccggagtcaaccggataagtagacagcctgataagtcatacgaaaaacaggcattgacaacgcaaggtaacaagtagtaagatgcacaacgtaacgtcaaccagcaaatcggtgtcttctaggtgacttaagcgcaccacggcacataaagcgaaacaaaatggttgacaacatgaagtaagcacggtacgatgtaccacatgaaagacaccgagtgtcgtaggtgtaaaaacgcgacatagtggatagatggcgaaagcacaagcgaccacgataataaagagcttgtcgcacttataatgcaagtgacggctaacactgaaatagcctcggctcgacgaaactgtagcctaaagttctttaacaatctggataatagctcttgagtgtaccgacgtataagcgaataactcaaggtcgcactgaaagcgtggcctttatgatattcacttaacatgaactaacatgaggtaacaccaaatgattttcactaaagagcctgctaacgtcttctatgtactggtgtcagctttccgttccaacctcgacgatgaggtgaacatgagtcgccaccgccacatggtaagcactttacgtgccgcaccgggtctttatggctccgttgagtcaaccgatttgaccgggtgctatcgtgaggcaatcgcaagcgcaccgactgaggaaaaaacggttcgtgtacgctgcaaggacaaggcgcaggcactcaatgttgcacgcttagcttgtaatgagtgggagcaagattgcgtactggtatacaaatcacagactcacacggctggtctggtgtacgctaaaggtatcgacggttacaaggctgaacgtctgccgggtagcttccaagaagtgcctaaaggcgcaccactgcaaggctgcttcacgattgatgagttcggtcgccgctggcaagtacaataagtgttaaactcaaggtcgctccatgcgagtggcctttatgattgacattacaggaggattagcaatggttatatttatcactatcgcactctttgcggtcgctggctggtactctgagtcacgcaaggccgctcgctatcatcgcaagatggttaaactcatggaacacttggacgcagaagggcgaggctgcgaggctatcgaactggtgaaacacgcatgatgattctctttatcgcactggtctatctgtgcatcgctatgtactttatgcgagactttaagcgcggtctggtaatacacaaggcaacgctgagttactttaagtggggattcatcccacggtttacggttcgtgaacgtaacggacgatttaaggccaacaaggtaggagtattctacattgctacgcactaactcaaagcacgtaaagaccgcactgtatgcgatggcgtatggtgcatcgaaacgcaaggtcaaacgcatcttaacgagacaccgcaagatgaccgcacgacaggctgcaagcgctgtcaaatgggctgaatttactctttactcttcttacagataacaggacactgaacgatgactttcaccgaagcacaagccgcactcgaagctatccgcaacctgccgattgagcgcctgaacgaacgccagcccatgctggtggctcttgcggctgctatcgtgaacgatgagactcaagacggcgaactgacgcaggccaaaggtaattggggcttggagtctatggactactggcagacactggctgagcgtatgcgtgatgttggatttgtacgcttgggcaacggtcactttagcgcagcatatgagcacgcattgttaccgggcaaggttatcaaggtaggctttaagaaagaggattcaggcgctgcctatgctgcattctgccgtatgaaccaaggccgggaaggtatccctacggtgtacgacattcagcgtcatacaggctgctacacggtggtcttggactatctgacaccgcttaacgattggtgccacggtgaaagcgataagattcgccaccacttccacgctgcaagggaaatcattgaggaggattgcttcgataccgccgaagagtacccgataagcgagggcttcattgagacctgcaaggatatccgcaagttcttcttaggcatcgcatcgttcgattgtcacagcgggaacatgatgaaagaccagatgggacgcctgattatcacagacccggtatcgttcagcgcagacgacaagttaaagccgggtgagttccactgtgacccggatgaactcatcgctgagattgaggcgctgagagcgcaggaagcgattgaccgctgcaaggcacgtaaggcacgccgtgaccctaaaggagactttcaggtagcacgtaaagcccgtgccaaatggcgcagaaaggcctctaagcgtgctaaacgtgacgctaaggtactcgctaagatgcgcatggacgccaatcagaatcgcagggatgagcctagggcgcgtatggtgtggggcgataagcactggcgcaacgcttggatgcaccacaataacctaaactttgcagaactggagcgccgcgctgctgcggcaatgatgatgcatgacgaggtgcgcattcagtggggcaaaccgttacacatagacgcataccttgacaggagactgcaaggctgatagagtcttttcttacaggtcatcatgaggtggcctgaataggaacgatttattcacaacgaggtaagcaatgaacatcatcgaaactatcgaaaagaatgacttctccgaaatcgaactggctgctatcccgttcaatacactggcagaccactacggcagcgcattggctcgtgaacaactggctttagagcatgagtcttatgagctaggcgagcgccgcttcctcaagatgcttgagcgtcaagctaaagctggtgagattgcagacaacgcagccgctaagccattactcgctactcttctccctaagttaaccgcacgtatcgtggagtggctcgaagagtacgcctcgaagaaaggccgcaagccagtagcctatgcaccactccagttactcaagccggaggcgtccgcgtttatcacactcaaggtcatccttgcgtcactgaccagcacgaacatgacaaccattcaggccgctgctggtatgctggggaaggccattgaggatgaggcacgtttcgggcgcatccgtgacctcgaagcgaagcacttcaagaagcacgttgaggaacagcttaacaagcgccacgggcaagtctacaagaaagcctttatgcaggtggtcgaggccgatatgattggtcgtgggctgcttggtggtgaggcgtggtctagctgggataaagaaaccacgatgcacgtagggattcgcctgattgaaatgctgattgaatccacgggtctggtggaattacagcgccacaacgcaggtaacgcaggctctgaccatgaggcactacaactggcccaagagtacgtggacgtattagcgaagcgtgcaggcgctctggcgggtatctctccgatgttccagccatgtgtcgtaccgccgaaaccttgggtagcaatcaccgggggcggctattgggctaacggtcgcagacctttggcactcgttcgcactcactctaagaagggcttgatgcgctacgaagacgtttacatgccagaagtctacaaggctgtgaacatcgcacagaacaccgcatggaaaatcaacaagaaagttcttgcggttgtcaatgagattgttaactggaagaattgcccggtcgcagacattccagcgctggagcgccaagagttaccgcctaagccggacgacattgacaccaacgaggcagcactcaaggagtggaagaaagccgccgctggtatctaccgcttggacaaggcacgagtgtctcgccgtatcagcttagagttcatgctggagcaggccaacaagttcgcaagcaagaaagcaatctggttcccttacaacatggactggcgcggtcgtgtgtacgctgtgccgatgttcaaccctcaaggcaacgacatgacgaaaggtctgctgaccctcgctaaaggcaagccaatcggtgaggaaggtttctactggctgaaaatccacggtgcgaactgtgcgggtgtcgataaggttcctttccctgagcgcatcgcgttcattgagaagcacgtagacgacattctggcttgcgctaaagacccaatcaataacacttggtgggccgagcaggattcacctttctgtttcctcgcgttctgcttcgagtatgcaggcgttgcgcaccacggtctgagctacaactgctctctgccgctggcgttcgacgggtcttgctctggtatccagcacttctccgcgatgctccgcgatgaggtaggtggtcgtgcggttaacctgctgccaagcgaaaccgtgcaggacatttacggcatcgttgcacagaaagtaaacgagattctcaaacaggatgcaatcaacggcacacctaacgagatgattaccgttaccgacaaggacaccggggaaatctcagagaagctcaagctgggaacctcaacgctggcgcaacagtggctggcatatggtgtaacccgtagcgtaactaaacgttcggtcatgacgctggcttacggctccaaggagttcggctttcgtcaacaggtactggacgacaccattcagcctgcgattgacagcggtaagggcttgatgttcacccaacctaaccaagcggctggttatatggctaagctgatttgggacgcggtgagcgtgaccgtagtcgcagcggttgaggcgatgaactggctcaagtctgccgctaagctgctggctgctgaggtcaaggacaagaagaccaaggagattctgcgccaccgttgtgcggttcactggactacgccggacggcttcccggtctggcaggaataccgcaagccactccagaagcgtctcgatatgattttcttagggcaattccgtctgcaaccgacgattaataccctcaaggattcaggcattgacgcacacaagcaggagtctggcatcgcgcctaactttgttcactcacaggacggtagccacctccgcatgacagtagtttatgctcacgagaagtatggcattgagtcctttgcgctcatccatgacagctttgggactattccggcagacgctggtaagctctttaaggctgtgcgtgaaacgatggttctcacctacgagaacaacgatgtgctggcagacttctatgaccagtttgcagaccaattgcacgagacccaactggacaagatgcccccgcttccgaagaaagggaacctgaacctgcaagacattctcaagtctgactttgcctttgcataacaagcacttagcattaaccctcactaacgggagactacttaaggtctcccactttaagacactttaggtactaagagattaaatttatgattaacattaagactttctttaagaacatctttaagctaaaccgcttgacttccgttaagttctacgcttggatgcccggtagtgatgacctccgcaagactgaatttaagttaggcttagggccgtgcggcaaggtggtcacgaagttggaatgttactcaacgtcctccgggatggtcatcttccagaccactgaggacaacgaaacgaaatccttctactacccgaaaggttcaacgtgtggtcgtatcgaacggacatacagttaaccctcactaacgggagagttaaacttaaggtcatcaacaacggtggcctttgtgattaactttcaatacacatcaacatgaggtaagatactatgcgtaccaactttgagaaatttaccaagcgcgattcagtggtcaacgagcatggcgaacagtggcaagagcgccgtgaccgcatgaagaaacgccacaagcaacagcgcggtaactcacagaaacgggagtggaactaatgatgggacgtatctatagcggcaacctgaacgattacaaagatgcggtagcgcgtctacaggaagaccatgacgtgaccgtgaaggtggagtcattcagctatgaaaacccagcgaagatgtgcaggtcatccggtgaggttctccgcgtgttcacacgctcagggcatccggtggcatccagaaccttcgagcatagcgacagcgatgtacaaatcaacgcgcagactgcatggctccgtaaggttcacagcgatttgaaacactggaagtaataaccctcactaaagggagaacgaaaggaggaaacattatgagaatttcatttgacttaatgagtccttcctttctctcatgggatacgggtcgtcacactggcggctctattcgcaacggctatagaagggttcgttatgaaggtaagtggttaaaccatcacatactcatttgggaacacttcaacggtgcagtcccggagggaatggaagtagaccacattgaccgtaacaaacttaacaacgcgcctagtaaccttagacttgtgacccgctctgagaacaacagaaatcggtcagtacaccggaacaacaagtcaggaatcaaaggtgtctactggcacaaacaccgccaagtttggtacggtcagtgtcgaagaggcaacaaaacatttatcaccgctggttgctccacgaaggaacaggcggcagaacttttagagaaactcaaagaggaaattaattatgatgattttcaaaaccgtcccgtataaggctgtgtcattcgtagagtctgccgttaagaaagcgctggagacctccggctacctgattgctgacattaagtacgatggtgtgcgcggtaacattgtggttgacaacgtggctgaggccgcatggttgtctcgcgtatccaagttcatcccggcgctggaacacctgaacggtttcgataagcgctggcagcaactactgaacgatgaccgctgcattttccctgatggcttcatgctggatggtgaactgattgtcaaaggcgtagacttcaacacagggtctggcctgctgcgtaccaagtggctcaagaagaacaacttcatgtttgaccgtggtggtgttgagccgctgaaaggttccaaagtagcctttgagttagaccctaagcgcctgagtgtgcgcctgtatgctgtcatgccgattcacattgcggagtctggcgaggactacaatgtacagaacctgctgatgccgtatcatgtggaagccatgcgctctcttctggttgaatacttcccagaaatcgagtggcttattgctgagacctatgaggtctacgatatggattcgctgactgaactgtacgaggccaagcgtgccgaaggtcacgagggtctcattgtgaaagacccgcaaggcatctacaagcgaggcaagaagtctggctggttcaagctcaaaccagaatgtgaagctgatggcatcattcagggtgtcaattggggaaccgaaggtttagccaacgagggcaaagtgattggctttagtgtgcttcttgagactggtcgtttagtagacgccaacaacatctctcgcgcactgatggacgagttcacagccaacgttaaagcccatggtgaagacttctacaacgggtgggcctgtcaggtcaactatatggaagagaccccggacggctccctgcgtcaccctagcttcgagaagttccgaggcactgaggacaaccctcaagagaaaatgtaaccaactcactggctcaccttcacgggtgggcctttcttcgttccgggggggaattaaccctcactaacaggagacacacaccatgtggcttatcctattcgctatcgtcgcaacgctgggattaatggctgccgacgacaacatttggcctgattgttaaggagataacatcatgcgtttacatttcaacaaatccaacggtatcttttcggttcgccgtaaagaccgctcgaccgtattggcctctgagcgcaacgccaagctgccgctgattggttcggtcgccacgctatccccttgcgttcacctgctgattactcgcggtgagttcgtcaaggcgatgaacaaagagcgtccgcatctggaagccgtggtcacttactggcctcgcgttcgtctgttcgttaaatggcttaaggaggtactgtaatgttacaggaatattatgatatgcgtagccgcttcccggttaactctgccgttcgttattcaggagcgaaccctttgttcaagggtctgaccggaacagtgcagggctactctcacactggtcgagtcaaggttcgcttcggtattcgtgaggctgaggtgcatccatccgtactaatcccgctacctaaagtcggcccgaacgtggaagcaccgaagacagaagtcaagtctgacgtgacccatccgaaccactacatgctgttcgacaacgtggaagccattgaggttatcgcccggtcaatgaccgtcgaggcgttccgtgggtactgccttgggaacatcctgaaataccgcctgcgtgctggtaagaaatccgaactggcaacgatggagaaagaccttaagaaagcggctttctatcaggaactgtttgacaaacataaggggctgtgttatgacgcttcgtgaatgctgcgattggtgtgccgctaagtggaaccaagctattgaggatggtgacaaggcggctgctgacgcttaccaacaactgtacgcgctgtgggagcggcgctttaaggaggcccaaagtggagcaacgtgaacagaaataccttctgacaatggaaggtaacaccgagtcctttgagattccggtattcgcccggtctctcgaagaggcaacgctacaggctgaacattacgaggacgcagggttcgtagtgactcgcatccgtccagaagtgaaagcctaattaccctcactaaagggaacaacccaatcattaaccacaaaggagaaatactatggctggtttcaagaagaaaatctacacctccggtcttggcactgctgagccttatgcttacctgagtaagccggattatggcaacgaagagcgtggcttcggcaaccctcgtggtatctataaggtagacctgactctttccaataaagacccgcgctgtcaggcgatggtcgatgaaatcgtgaagactcacgaagaggcttatgctgctgccgtggaagagttcgaggctaacccgccgcaggtacagcgtggtaagaaaccactgaaaccttacgagggcgacatgccgttcttcgataatggtgacggtacgactaccttcaagttcaaatgctatgcgtctttccaagataagaagaccaaagagaccaagcacatcaatctggtcgtggtcgatagcaagggtaagaagattcaggaagtgccgattatcggtggcggctccaagctgaaagtgaaatactctctggtgccgtacaagtggaacaccgctgtgggcgcaagcgtcaagctgcaactggagtccgtgatgctggtcgaactggctaccttcggtggtggcggtgaagatgagtgggccgatgaagtcgaagatggtggttacactgcgagtgaatcccgtcagtcccgcgatgagcaggagtggcaggaagacgagcacgaagaaaccccggatgaggatgaggacttttgagtcgcctgagccgcgaacaactgcaagctaagattcgtgccaatgtagaactggatggcgactgctggatttggcagaagtccttcggttctcatgggtacggtaacataggcactggtggcggtcgaaatgagaccgtccatcgggtgtctcatgaagtgtttaacggagagatacccaagggtctgattgtcctacatagctgcgacaacaggaagtgctgcaacccggcacatcttcgagcgggaactagggttgacaacatgaaggatgccttgcaccgctccccaataaagcgcaagctgacactggaggaagcacaggagatttatgattctaagctgtcacaaagaaaactcgctgaactctatggtgtatctcagagattaatctggaacataaagagaggtgcagcatggcagcatatggtgcaaaaggaatacgaaaagtaggaaccttccggtcaggactggaggacaaagtacataaacaactggaggctcgtggtataaaggctgaatatgaaatgtggaagattccatatgttgtgccagccagtaatcacacgtaccgaccagattttattttacccaatggaatcattgtcgagaccaagggactgtgggaagctgatgaccggaagaagcacttgctaatccgtgagcagtatcctgaactggacattcgtctggtgttctcttcgagtcgtaccaaaatctacaaagggtctccaacttcttacgccgagttctgcgagaagaaagggattctctttgccgacaaactgatacccgtcgagtggctcaaggagcctaagcgggacgtaccgtgggagaaactaattcgtgtaaaggagaaaaagtaaatggctaaagttcaattcaaaccacgagcaaccacggaggcaatctttgtgcattgctcagcaaccaagccaagccagaacattggcgttcgtgagattcgtcagtggcacaaagagcagggctggttagacgtaggatatcacttcatcatcaagcgtgatggcactgtggaagcaggccgcgatgaactggctgtaggttcccacgtgaaaggttacaaccacaactccgtaggcgtatgccttgtaggtggcatcgacgataaaggtaagtttgacgccaactttacacctgcgcaaatgcaagcgctgcgtagtctgctggtcacgctgctggcgaagtatgagggttcaatccttcgtgctcaccatgacgttgcacccaaagcctgcccgtccttcgatttgaagcgctggtgggagaagaacgaactggttacatctgaccgagggtgataccatgaggatgatttgtattcgctgtgataagccgttgaagagtcgcgtaccgtcacgccagtgtcagtgcaaagacccaatcaaggctgaggaacacaccgaggaataattaacactcactaaagggagacttaacggtttccctttgttctcgcaactgattaaggaatgtacaatggaacgagaagacgatagtatctttctgtttcatgctccatgtgaaaactgtgggtcttctgatggtaactctgtgtactctgacgggcatgaatggtgcttcgtgtgtgaacatcgagtacccgcaaacgaagagcgtgaagcaaagttatcaacgagaagacgtacaggaggcagcaagcctatgagctatgacgtatggaatttcggtgacagcaacggtcggtactctgacctgactgcccgtggcatctcaaaggagacgtgccaaaaggctggctactggctggcgaaagtggacaaccgaatgtatcaggttgcggattaccgtgaccagaatggttccatcgtgtcacagaaggtgcgcgataaggacaagaactttaagaccaccggaagtcacaagagcgatgcgttattcttgaagcacctctggtctggcggtaagaagattgtggtcactgagggcgagattgatgcgctcactgtgatggaactccaagactgtaagtacccggtcgtatcattgggtcacggtgcctctgctgctaagaagacatgcgccgctaactatgaatactttgaccagttcgagcagattatcttgatgttcgacatggatgacgcaggacgtaaggcagtcgaagaggccgcacaggttctcccggctggtaaggttcgtgttgccgtgttgccgtgtaaggacgccaatgagtgtcacatcatgggtgaagacaaagcaatcttggagcaggtctggaatgcaaacccttgggtgcctgacggtgttgtctctgcgttgtcactcaaagaccgcgttaaggaagctatgacctccgaggacgctgtaggtctgctgttcgatggctgtcaaggcctgaacgatagaaccttgggtgcccgtggaggtgaagtcatcatggtcacttccggttccggtatgggtaagtcaacgttcgttcgtcaacaggcgctggcttggggcaagcgaatgggtaaacgtgttggcctagcgatgctggaggaatccgttgaggataccattcaggatatgatgggtctgaacaataaggttcgtctgcgtcagtctgatgaagtcaagaaggctatagcagaggacggacgtttcgatgaatggtatgatgaactattcggagatgatacgttccacctttatgactcctttgcggaggccgaagctgacaggctgttagcgaagctggcctacatgcgaacaggcttagggtgtgatgttatagtgctcgaccacatatcaatcgtcgtgtctgcctctgaggaatcggatgagcgtaagatgattgaccgcctcatgactaagctaaaagggttcgctaagtcaactggtgttgtgctcgtagtgatttgtcacttgaagaacccggagaaggggaaaccacatgaagaaggacgcgctgtttctattactgacctacgtggtagcggtgccttgcgtcagttatctgatactatcatcgccttggagcgtaaccagcaaggtgatatgcctaacttggtgttggttcgcctgcttaagtgtcgtttcactggcgacactggaattgccggatacatggaatacaacagagaaaccgggtggcttgaaccgtctagctacactggcgaagaaggagaaggagatactggctggactgaacaagacggacagtcagacttctaagtaccagtgccactgcggtcatccagactgtgatggcggaatgtaccactaattaaccctcactaacgggaacaacctcaaaccataggagacacatcatgtttaaattcattaacgctttaggtaagctggtagtcaaactgtacttcatcgaagccaagaagctggacaagaaggccaaagcagattcacagcgagccattgagttggcgaaacagtcccgtgagaaatcagatgcggctgttagtggcatccacaagtcggcagcgattgcagccaaagcacagtccatgagcaaattctttgagtaaggagcgaacactatgagcaagtcaatcactcacgcaaacaccatccgtcttccagacaccgccgaccagttctcccgccgagtacacatcaatgtacgtggcgagaaggtcacgatggtctaccgctggaaagaccacaagtctccgaaagcacacactcaacgaatgacattggatgacaagcaggtcggtcgccttatgggtgccctgactatggctgctgacaaggtggtcggagataaccgtgagcgtctggtagagttcggcgctggtatgcaagagattatcgagaagtgataaactcaaggtcgcccaagggtggcctttatgattatcatttagcacgaaaccaaaggagggcattatgctcgtaagtgacattgaggccaacaacctcttagagaaagtcaccaagtttcactgtggcgttatctatgactaccgtgatggtgagtatcatagttatcgtccgggcgacttcggggcgtatctggatgcgctggaagccgaggtgaagcgaggtgggcttattgttttccataacggtcacaagtatgacgttccggctttagagaaactcgcaaagctgcaactcaatcgtgacttcaagttaccacgtgagaattgtattgacacattggtactctcgcgtttacttcatgcgaaccttaaagacacagacatggggcttcttcgttccgggaaactacccggtcgtcgcttcgggtctcacgctcttgaggcatggggttatcgcttgggcgagatgaaaggtgaatacaaggacgacttcaaggctatgctggaagagcagggcgaagagtatgttgaaggtgccgagtgggtttcattcaacgagccgatgatggcgtataacgttcaagacgttgtggtcactgtcaagctcttagagaaattccttacagacctccactacttccctgcgggtatggacttcacgaagtacgatgcggatttattctggcgtgaagctggcgagtctgtggatattgaacatcgtgcagcgtggctgttagcgaagcaggagcgtaacggcttcccgttcaacacacaggccattgaggaactttatgtagaactggcagcgaaacgcgccgaacttctgcgaaagttaaccgaaacgtttggctcgtggtatcagccgaaaggtggtaaggaactcttcaagcacccacggacaggcaaaccacttccgagttatcctcgcgtggtctatccgaaacagggtggcgtgtacaagaagcctcgtaataaggcacagcgtgaaggtcttgaaccttgcgacttggacacgagggattacatggagggtgctccatatactccggtcgagttcgttacgttcaagccaagtagccgtgaccacattcagaagaaactacaggaggccggatgggttcctgagaagttcaccgagaagggtgcgcctgtggtggacgatgaggtcttggagcatgtacgagtggatgaccctgagaagcaggcgtgcattgacttgattaaagagtacctgatgattcagaagcgaatcggtcaggcggcagaaggtgacaaagcgtggttacgttatgttcaagatgatggtaagattcatggagccgttaaccctaacggtgcagttactggtcgtgctactcatagtttcccaaaccttgcacaagtacccggagttcgttctccttacggggagcagtgtcgtagcgcttttggtgctgaacatcatttggatgggattactggcaagccgtgggtgcaagcggggatagacgccagtggcttagagttgcgctgtctggcacacttcatggctcgcttcgacaacggagagtatgcgaatgagattctcaacggtgacattcacaccaagaaccagaacgctgcggaactcccaacgcgcgacaacgccaagaccttcatttacgggttcctttacggagccggagatgagaagattggtcagattgttggggcagggaaggagcgcgggaaggaactcaagaagaaattcttagagaacaccccggcgattgcagcactacgagaagctatccaacattctctcgttaagtcttccgcttggattggtggtgagcagaaagtccagtggaaacgccgttggattaagggtctggatggtcgcaaggttcacgtcaggtctccacacgcagcgctcaacacattgttgcagtctgctggtgctctgatttgtaagctgtggattatcaagaccgaagagatgctcattgagaaaggcttgaagcatggctgggatggtgactttgcgtacatggcttgggttcacgatgagattcaggtggcctgccgtacagagcacatcgctcagattgttattgacaccgcgcaggaagctatgcgttgggtcggagagcattgggctttccgttgtcgtttagataccgagggtaagatggggccgaattgggctgtctgccactaattctataggagaaattattatggctatgaccaagaaatttaaagtgtcattcgacgttaccgctaagatggcatctgacgttcaggaaatcttggagaaagacattctgcacctgtgtaagcaggttggctcaggcgctattgtccccactggtaaacagaaagagatgattgtccagttcctgacgtatggcatggaggggctgatggccttccttgtgcgaacgtctttccgtgaggccattaaagatatgcacgaagagtatgccgataaggacagcttcaagctgtctcccgctactgtacgggaggtgttctaatgagtgaatacctgaaagtgctggcagctatcaaaggttgccctaagtcctttcagtcgaactatgtgcgaaacaatgcggctctcgtagctgaggccgcttctcgtggacacattagctgtttgactgtgggtggtcgcaatggtggagcatgggaggtcacagcctctggtgtgcgcttcctgaaacgaatgggaggttgcgtatgattatgccaaagagtgacaccgtaacgatgacccgtgatgcgtggaacgatgttagtgcgtacattgataagctggagaaagacctagagttcctgaatgcgcttaaggcgtgtggtgtggataattgggacggatactctgatgcagtagaaatggtttacggggaggatgacgaatgagcctaatcacattgaaagacttcgcggagatgcgtgaaggtaagcctatggagaagggagtgctggtcatggatggtgactggttggtctatcagtcaatggctgctgccgaagttgagacggattggggagacgacatttggactcttgagtgtgaccacgccaaggcacggagcattctcgattctgcaatcgaatcgtaccgaacccgtaagaaggcttggagtgacgctatggttgttctggcgtatactgacgatgtgaactggcgtaaggtactggttgatgagacctataaggagaaccgtaaggcgacccgtaagcctgtaggataccgtgacttcctgtcgaagctgtgggagcgcgatgagttcattcacatcaaagaggacatgctggagggcgatgacgttatgggaatcgttgggtctggtcacgaggtcttcggcttcaagaaggctgtgttggtctcctgtgacaaggacttcaagactatcccggacgttgacttcctgtggtgtaccactggtaacatcctgacgcagaccaaagagaccgctgattggtggcatctcttccagactatcaagggtgatatgactgatggctactccgggattcccggctggggcgatacggcagaaggtttcctgaatgacccgttcattgtggagcctgtagagtccgtgttgaagtctggtaagaacaaggggcagacagtaaccaagtgggtgaagcgtgctcctgatgcgactgagacgctgtgggactgcattaaatccattggtgccaaagctgggatgaccgagcaggaaatcatcaagcaaggtcagatggctcgcattcttcgcttcgaggaatacaattacattgacaaggagatttacttatggacgccgcaaagctgattaccatcgctgtgctggtaggtatgctggcgcgaggtctctggatgctcgctctcatagtccgagacgtgaagcgagactccgagattaagtgataaactcaaggctctctgtattaaccctcactaaagggaagagggagcctttatgattattactttaagacttaaccttaagaggtgaaattatgttacaaccaattaatcatgttttaactcatcccgatgatattcctagtatgccgcgtgcagccaaagagtatctacaggtgcgcttcaatcaggcctatgtgatggagtccggggagtaccgtgcgctacgcgctgctggatactctgagtctttcattgctggtgtgatgcatggtctgtaccttgcctctcgaacacttgatgagattgaggtgcgtaaagagcaactgagacaggagtaatgatatgtgctggaaaccgaaggtgaaagtccctaagatggacactaaccagattcgcgctgccgaaccagcacctttgactgagccaccgaaatctgtggtatggggaggtgatgacgatgaggacaccagcgtgtcttcctctgaggtgccaacctcaccgagcagcggtaagagcagtctcaaggtaaagctggatgacagcgcagccaagaacaagagtaaatcctccattcgctccaaggcgtttgggtaactgagtcataacatagggagaaacatcatgggattcttcaagaaaatcaagaaggctgttaagaaagtcgtgaaggaagttggcaaaccgatcgagaaggctggtaaggaagtcggtaaagccgttgggggcgctctgggtgcaggtaagcaggagattatccaacaagaggctcctgcaccagtagtgactgcgccacctccagcacagcttgtagatgtacctgaacaggataaggctgagggtgaggatgaggcacaaaccgaaagcgcacgtaagaaagcacgcgctggcggtaagaagtctctgagtgtagcccgtagctccggcggtggcatcaacatctaaggaggactgaatggctgattcaaaacgtacaggattgggcgaagacggtgctaaagctacctatgaccgcctaacgaacgaccgtagagcctatgagactcgtgcggaaaactgtgcgcaatacaccattccgtccttgttcccgaaggagtccgataacgaatctaccgactacacgactccgtggcaggctgtaggtgcgcggggtcttaacaatctggcctctaaattaatgctggcactattcccgatgcagtcgtggatgaagctgaccattagtgagtatgaggcgaagcagcttgttggagaccctgatggactcgctaaggtggacgaaggtctgtctatggttgagcgtattatcatgaattatatcgaatccaacagctaccgtgtgacgctctttgagtgcctcaagcagttgatcgtggcaggtaatgcactgctttacttaccggaacccgaaggtagctacaatccgatgaagctgtaccgattgtcttcttatgttgtccaaagagacgcatacggcaatgtgttacagattgtcactcgtgaccagatagcctttggtgctctcccggaagacgttcggtctgcggtagagaaagctggtggtgagaagaagatggacgaaatggtcgatgtgtacacccatgtgtatctcgatgaagagtccggcgattacctcaagtatgaggaagtagaggatgttgagattgatggctccgatgccacctatccgactgacgctatgccctacattccggttcgcatggttcgcattgatggcgagtcttacggtcgctcctactgtgaagaatacttaggtgacttaaggtctcttgagaatctccaagaggctatcgttaagatgagcatgattagcgctaaggtcatcggtctagttaatccggctggcattacgcagccacgtagattaaccaaagctcagactggtgacttcgttcccggtcgtcgagaagacattgacttcctgcaactggagaagcaagctgactttaccgtagcgaaagctgtgagtgaccagatagaagcacgcttatcgtatgcctttatgttgaactctgcggtacaacgcactggtgaacgtgtgaccgccgaagagattcggtacgttgcgtcagaactggaagatacgcttggtggcgtctattcgattctgtctcaagaactgcaattgcctctggttcgtgtgctcttgaagcaactccaagcaacctcgcagattcctgagctaccgaaagaagccgttgagcctactatcagtacaggtctggaagcaatcgggcgtggtcaagacctcgataagctggagcgctgtatctccgcttgggctgctctggctcctatgcagggagacccggacattaacctcgctgtcattaagctgcgcattgcgaacgccattggtattgatacttctggtatcctactgacggacgagcagaagcaagccctgatgatgcaggatgcggcccaaacaggtatcgagaacgctgccgcaactggtggggctggcgtgggtgccctagcgacctcaagtccagacgctatgcagggtgccgcagcacaggctggcctcgacgccacctaataaccctcactaaagggagacctcatctttgaaatgagcgatgactaaaggttggagtcctttggtttccctttatctttaacaacttaggagatttaacaatggctgaatctaatgcagacgtttatgcgtccttcggtgtgaacaacgcggtaatgaccggaagtacacctactgaacacgaacagaatatgctgagtctcgatgttgctgcccgtgatggcgatgatgcaatcgtacttagcgaggaaccgagttcccataacgatgacccatatgcatccggtgtagacccgttcgctgatggtgaagacgatgagggccgcattcaggttcgtatcagtgaagatggtaatgaagccgagttcgacactggtagcgataacgctgaggtggagaccgaaggtgcggacgttgagtttgaaccgctgggtgacactccagaagaactaagccaagtgactgagcaattaggtcagcacgaagaaggctttcaggcgatggtcgagcaggccgttgagcgtggactgagcgcagagtctgtgactcgcatctacgaagagtacgaagccgatggtatctctgagaaatcctacgcggaactcgaagctgctggctatagtcgtgcctttgtggactcctacatctccggtcaggaagcccttgtagaccagtacgtcaatcaggtagttgcctttgctggtggtaaggagcgctttagcgcaatccatacgcaccttgaagcaaccaacccggctgcggctgagtcccttgaggctgccatgatgaaccgagacttggcgactatcaaagcgattatcaatctggctggtgagagttacacgaagaaattcggtaagcctgccaaccgtagtgttaccaagcgtgctactccggttaaacctgtagctcgtcagaaagagggctttacgaatcaggctgagatgattaaagctatgagtgacccgcgttaccgtagcgatgctgcctaccgtcaaatggtagaacagaaggttatcgactccagtttctaattaaccctcactaaagggagagaccatagatgactacaatggttgaatcacctgagcacagaactttgtggtcactcccgtaggtgaaacattgagaaccaactcgattcaagtagtaaccaaacttttctttaaatcaacataaggagattcaacatggctaacattcaaggcggacagcaaattggtactaatcagggtaagggtcagtccgcagcggacaaattggcgctgttcctgaaagtgttcggcggtgaagtcctgacggctttcgctcgcacctccgtgaccatgcctcgtcacatgctgcgctctattgcttctggtaagtccgcacagttccctgtgattggtcgcaccaaagctgcttacctgaaaccgggtgagaacctcgatgacaaacgtaaggatatcaaacacaccgagaaggtaatccacattgatggcctgctgactgcggacgtgctgatttacgacattgaggacgcgatgaaccactatgacgttcgcgctgagtacaccgcacagttgggtgaatctctggcgatggcggctgacggtgctgtgctggctgaactggctggtctggttaacctgcctgacgcctccaatgagaacattgagggtctcggtaagccgaccgtactgactctggttaagccgaccactggcgacctgactgacccggttgagctgggtaaagcgattatcgctcagttgactatcgcgcgtgcgtctctgaccaagaactacgttccggctgctgaccgtaccttctacaccactcctgataactactccgcgattctggctgctctgatgccgaacgctgcaaactatcaggcactgattgaccctgagcgcggcactatccgtaacgtgatgggcttcgaagtggttgaggttccgcacctgactgctggtggtgctggtgatgaccgtgaggacactccggctggccagaagcacgctttcccggcgacttccagcactaccgttaaggttgctctggataacgttgttggcctgttccagcaccgctctgcggttggtacggtcaagctgaaagacttggctctggagcgcgctcgtcgtgcgaactatcaggctgaccagattatcgctaaatatgcgatgggtcacggcggtctgcgtccagaagctgctggcgctatcgttctcccaaaggtgtcggagtaattcccgaccccactggagttactcttagtcagaagactatgagcttagtcgttggggcttctaaagccctgactgctacggtaactccggctgatgcagtacagacagtgacctttacgtcttccgatgtgaagattgctacggtcgatgcctctggtactgtaactgctgtgggcgctggctccgctgacatcactgctactactgtgaatggcctgacggctgtctgcaaggtcactgtgaaagcagtagagcctcccgtagaaggctaaggtctttaccggggatttactttccttcattactttatgaaccccttgggtgccctctgagggtatctgaggggttttttgctttaaaccctcactaacaggaggtaacaccatgcgctcttatgagatgaacattgagaccgcagaagagctatcagccgtcaacgacattctggcttccatcggtgagccaccagtatcaacccttgagggtgatgcgaatgctgacgttgcgaatgctcgacgtgtactcaataagattaaccgacagattcaatcacgaggatggacattcaacattgaggaaggtgtgactcttctaccggatgcgttctctggcatgattccatttagctctgactatctgtccgtaatggcaaccagcggtcagacccaatatgtcaaccgtggtggctatctctatgaccgctctgcgaagaccgacagattcccttctggtgttcaggtcaacctgattcgtctgagagagttcgatgagatgcctgagtgcttccgtaactacatcgttaccaaggcttcccgtcagttcaacaaccgattcttcggtgcgccggaggtagacggagtgttgcaggaagaggaacaggaagcgtggcgtgcgtgcttcgagtacgagctagactacggtaactacaacatgctggatggtgacgcattcacctctggtctacttaaccgctaatcataaggaggctctatggctcttattagccaatcaatcaaaaacctcaagggtggtatcagccaacagccagatattctccggttcgctgaacagggtagcgtacagattaacggttggtcttctgagtccgagggtctccagaagcgcccaccgatgattcaccttaagacccttggcgctgctgggtatgtgggtgcgcaaccttacgttcacctcatcaaccgtgatgagttcgagcagtatttcgttgtgttcactggtgaagacattaaggtgttcgacctcgatggtaaggagtatctagtacgtggagaccgctcttatgtgcgtacagctaacccacgggaagaccttcggatggtaactgtggcagactatacctttgtgactaaccgcaaggtggttgtgcagagtaacgaccaatcggtcaaccttccgggctttaaagaccaaggcgatgcgctgattaatgttcgtggtgggcaatatgggcgtaggctctcaatcgagttcaacggggctgagcgtgctgctattcaactaccagacggctcacaaccagcacacgtcaatgaggttgacggtcaggccatcgctgagaagctggcggctcagttgcggaataacctagggaaccccaacaacgagcaagacccgaataagtggcgcttcaacgttggccccggattcatccatatccttgcgccaaataacgataacgtttggggactacagactaaggatggttacgcagaccagctaatcaaccctgtaacccattacactcagtcgttccagaagttgcctattaacgctccagatgggtacatcgtgaagattgttggtgatacctcaaagactgccgaccagtattacgttaggttcgacctcaaccgtaaggtatgggtagaaacaatcggctggaacacaaggactcacctgcactaccacacgatgccttgggcgctggtacgtgcttctgacgggaactttgacttcaagtaccttgagtggggtgctcgtactgtgggcgatgatacaactaacccatacccatcgtttaccggacagacaatcaatgatattttcttcttccgtaaccgtttggggttccttagcggggagaacatcatcttgtctcgcacctcgaaatacttcaacttcttcccggcctccgtgtctaactactctgacgatgacccaatcgacgttgccgttagtcacaaccgggtgtcaaccttgaagtatgccgttccgttctccgaagagttgctcctgtggtctgaccaagcgcagttcgttctgacagcctctggtatcctttcgagtcgctccgtagagttgaaccttacgactcagttcgacgtgcaagacagggcgcgaccacacggtgtggggcgtaatgtatactttgcgtcacctcgctcttccttcacatccattaaccgatactatgcggtacaggatgtaagctctgtgaagaacgcagaggacatgacggctcacgttccgaactacataccgaatggagtattcagtatatcgggtacaaccgctgagaacttcgcggctatcctcacgagcggagcaccgaaccgggtgtatatctacaagttcctctatattgatgaagaaatcaggcagcagtcgtggtctcattgggactttggggacaacgttacggtgtttgcagcacaggtgataaactcaactatgactgtattgatgggcaatgaacatgctgtgtggatgggacgcttacacttcacgaagaactctatagacattccgggagagccttacagattatacatcgacgctaagaggaaatacatcatccctaccggggcatataatgatgatacctaccagacgtccataagcctcgcagcgatttatggaatgaacttcactaagggtagagtgtctgtggtcttccctgatggaaagattatagaggtagacccgccagtcaacgggtggagtagcgacccaatattgagactcgatgggaaccaagagggacaagtggtttacattgggttcaacatcccgttcacttatacgttctcgaagttcctaattaagaagactgctgaggacggctcgacggctaccgaggatattggtcgcttacagcttcggcgtgcgtgggtaaactatgaggattctggcgcgttcaccatccgtgtgaacaacctgtcccgtgagttcatctacacaatggctggtgctcgattgggttccgacaatctgcgtgttggcaggtctaacattggaacagggcagtaccgcttcccggtggtgggtaatgcgcagacgaacatagtaactatcgagtcagatgcgtcaactccactgaacatcattgggtgcggctgggaggggaactaccttcgtcgttcttctggcatttaacttaaagtctccctgcggtgaattaaccctcactaaagggagacactaatagatacgagggttaaagcattatgtatattacaaagtgtttacaaagccacgctgacaactttcagccgtccgtagaggacattctggaagctgaggcattgggtgtcgaaccaaaggtaattcctgatgataacactgtggcaatgcttagcgataacgctgtgttggcaattggtggcaatcagggagaccgagtgtggttccttacctctaagtacgtcccactgtttaccttgaaggagcgcttagagtttcgtaagttaataatcgaatatcgcgatatgatgctgaaccagtacgagtccatttggaacttcgtatgggtaggcaataagtcgcacattcgtttcctaaagacaatcggagcggtattccacaacgagtacactctcgatggtcggttccaactattcacaatctcaaggaggcaacgtgaagaactgtaagaaatgcggagagatgaaagctgtctccgagttctataaggacaagaagagtaaggacggcctacgaagtcactgtaagccatgtcactacacgtattacaagaaggactactcaaaggcgcgagagatgaaccttaagcgtctgtacggaatcactctggaagaatacgaagcgatgctccttaagcaagacggagtgtgtgctatctgcggtcttaccgagagagttgagggacgggcgttagcggttgaccattgccacgccactggcgctgttcgtggtctcctttgctctgcctgtaacatcgctcttgggaagttcgaggacgacaccgagcgtcttcggaaggcaataacatacctaggagggaaatgattatgtgttggatggcagcaattcctatcgccatgatgggtgcccaagctctaagtagccagaacagtgctgacaaggcacgggtggcacagaccgaagctggacgcagacaggcaatggagatggtcaaagagatgaatatccagaatgccaacgcctcgctggaacaacgggacgcccttgaagctgcatcctctgagttgacttcacgtaacatgcagaaggtacaagctatgggaaccatccgtgcagctatcggcgagagtatgctagaaggcgaatccatgaagcgcatcaagcgtatcgaagagggcaactacattcgggaggctaatagtgtcaccgagaattaccgccgagactacgcgagtatctttgcgcaacagttgggacgcactcagtcaacagcaagtcaagtcgatgcaatgtacaagagcgaggccaaaggtaagtctggtctgatgcgtgtactagaccctctgtcaattatgggtcaggaagctgcaagtcaatatgcggctggtggatttgacaagaaaggtggaaaccaagcagcacctatcagtgccgccaaaggaaccaagaccgggaggtaataatggctagtaaactaaatagtgttttaggcaacatggcgactcccggtatggaacgactccggggcgtcaaaggcatggactaccgggcagcaaccattcaggctgagcaaccaagagcgagtcttctggactccctaggtcgattcgctaaggctggtgccgatatgtacatggcgaaagatgaacgtgataggcaacgagccgatgagcgttccaacgagattatccgtaagctgacccctgagcaacgccgacaggctatccagaatggtacactgctgtatcaggatgacccatacgcaatgcaggccttgaagttcaagaccgggcgtaacgctgcgttcctcgttgacgatgaggttcaacaggccatcaaagagggtcgcttccgtactcgtgaagagatggagcagtatcgtcactcacgcctacaggagcactcgaagtcgttcgctgagcagttcggcatcaatgagatggacgaggaataccagaagggtttcaatgctaacatcaccgagcgtaacattgctctgtacggcgcacatgataccttcctgagtgaccaagcgcagaagggtgcaatcctgaactcgaaggttgaactcaatggcgtcctgtctgaccctgacctgctgtctcgtcctgagtccggtgagttcttccagaactacatcgacaactccttggtgacagggatgaccgacaatcaggctcaacaggttatctcttcgtccctgaatgacgtgctacagcgtccgggtggtgccgccttcttgcagaacattgagaaccgcaaggtgactcttaatggcgctacgactacctatcgtgaactgatgggtgatgagcagtggcaggcaatgatgattaaggcacagcacactcaattccagaacaacgcgaagttaaccgagaagttccgactggatattaactcagcgcttaaccaagcggacactggtaaaggctgggagactcttcaaggcatcaaggccgaactcgataagattcagccgggtgaagagatgactcctgagcgtgagtggctgatttccgcacaggaacagatgcgcacccgcttcaagcaggaacaagctgagacagccaagctgatggacaagcaacagaagaccatgaataaatctctggtcatcgacaagcagttccagaagcgcctcaatggtgaatacgtctcgaccaactataaggacatgccgaccaacgagaacactggtgagtttacccatagcgatatggtcaactacgcgaaccagaagttagcggaaatcgaagcgatggacttaacgccagaacagaaagacaaactgaaattggactacctacgggcagactccaaggagggtgctttccgtgcagcgtttggtgagatgattaccgacgcgggtaacgaatggcaggctgcggtgattaacggtaagatgcctgagagcacaccagcgatggacaaccttcgtcgcatccgcaacactgaccctgacctgattgcctctctgtatcctgacaaggccgagttgttcctgacgatggacatgttggataaccaaggcatcgacacgcaggttcttatcgacgctgataaggcccgtgcacagaagaccaaggagatgcagtttgaggatgaccgagcgtgggctgctatgatgaacgattcaacgaatcctcaaatcaagtacatgccttcgagtgtccaagggtatgcccggaagatttatgattccgtgaagtaccggacagggaaccctgacatggcaaccgaacaggtcgcaaagttcctctccgattcgacgaccacgttctccagtagcgatgttgagggtgatacctacggcgtcctaccgaagaacatcctgactgtttcggatgaccctaagtcgtgggagcaggggaagaacattctggacgaagccattaagggaatcacagcggcgaacccttggattaccaacaagcaactgtcggtgtaccagcaaggtgattcaatctacctgatggacacaaccggacaggttcgcattcggtatgaccaagagttgctccagcgtgagtaccagcgtaccgcacagatgcaagctgaggcagcacgagagaaagccctcaaagaggccaacaagcgtgccccaatcagccgtgtatcacaggcgcgtgaagaagcgcgtaaacgtgtccaagagaaacggaagaagactccgaagtacatctatggacgtaaagaagactaacagtgataaggaggctccatgagctacgataagaacaaacctagcgagttcgatgggttatttcaaaaagcggcagacaaacatggggtctcctatgacctgcttcgtaaattagcattcaatgagtccagcttcaatccaaaggccaaatcaccaactggcccgaagggtctcatgcagttcaccaagggtacagccactgcgctgggactcaaggtcactgatgcagacgatgatgaccgctacaaccctgagttggctgtggatgcagccgctcgccacctgagtgacctcattcgtaaatacgatggggacgaacttaaggcagccctagcgtacaaccaaggcgagggcagaaatggtgcccctcagatgcaggcctacgacaaaggtgattgggcttcaatctctgaggaaggtcgtaactatatgcgtaacctgatggacgtagctaacagtcctcgcaagggggacttggaggcgttcggcggtatcaccccaaaggctaagggcattccatcgggggatgcatttgctggaatagggaagaagcagacggtaggaaccgacctgccggagtcaactggattcaaagtggagggtaaagagcagaaagcacctaacgtgccttatgctaaggacttttgggaaaagactggaacaacactggacgagtttaactcacgctctaccttcttcggaattggagatgcaacaagtgcggagcttcacaactctgtacttggagttgctttccgtgcagcccgtagcgacgatggttttgatttgttcaaggacaccattacgcctacccgttggaatagccatacgtggactccagaagagttagagcgtatccgtaaggaagtgaagaaccccgcgtacatcaacgtagtcactggaggctctcctgagaatctggacgccctcattaagatggcgaatgacaactacgagatggacgcgcggtctgccgatgctggtgttggtgccaaacttactgctggtatcgtcggtgctggtgtagacccgctgagttatgtaccgctagtaggcgtagccgggaagggtctcaaggtggctaacaaggctttcattgtcggtactcagagtgctggcctcgctgttgcctctgagggtctccgtacatcaatcgctggtggagaagcccactatgctgatgctgctttaggcggtctgatgttcggtgccgggatgagtgcaatcagtgacgctatcgccgctggtattcgccgttcccgtggtactgaggttgttaatgacttcgctcctatggcacaccgcttggaagcccgtgagaccgctctgaactctggtggtgaagacctgacccgtatgccgagcgagaaccgtgtgttcgaccgtgagcacgctggcgttgagtattcacctctggagaccgagccgggtgccgttgtgttgcctcaaggtcaaatccttagcgacaccaacccgctgaaccctcagactcttagcgagttcgaggctgtcaaccctgagcgtgccgcacgtggtatctctttgggtggcttcacggagattggcttgaagactctccgctctgagaacccgactgttcgctccattgcgagtgaccttgtgcgttctccgacagggatggaatcaggctctaatggtaagttcggtgcgactgcttctgacattaaggagaggctacacgcgaacaatcagcgcacctacaaccagctttatgatgctgttcgtactgcaatgaaagaccctgagttctccacaggtggtgccacaatgagccgtaaggaaatccgacaggaaatctacaagcgtgcagccttagcgattgagcggcctgagcttcaagcaaacctgacaaagggtgagcggaatgtgatgaacatcctcaagcagcactttgacctcaaacgcgaaatcatggagaacccgtcaatcttcggcaacaccaaggcggtcagtatcttccccggctcacgccacaagggaacctacgtgccaaacgtgtacgaccgagcaatcaagattgagatggttaaacgctacggtaatgatggcttacagcgagcaatcgcggagtcatggttgacgtcttatcgtgctcgtccagaagtcaaggcgagggtcgatgagtacctgatggaacttaacggtctcaaatccgtgcaggaagttacacctgagatggtgcagaagcacgcgatggataaggcgtatggtatttcacacaccgaccagttctctgcctcctctgtcattgaggataacattgagggtctggtgggtatcgagaacaacaacttcttggaagcccgtaacatgttcgacagtgacatggcggtgactctccctgatggtaacacgttctctgtgaacgacctgcgtacatatgacatggctgaaattctgcctgcatacgaccgacgagtagatggtgatgttgcaatcatgggtggttccggtaagactaccaaagacctgaaagatgaaatcatggcgctggataagcagtcagagggcaacggcacactgaaaggtgaagtggaagccctcaaggataccgtgaagattctgactggtcgtgctcgtaggaacccggaaggcgcttggggtacagccctgcgctccgtaaatgacctcacgttctttgctaagaacgcctatatgggcgcacagaacgttactgaaatcgctggtatgctggcgaagggtaacgtctctgcgataactcatggcatccctatgattaacgattgggtcaaccgtggtaaaccgcttcgtgcctctgagattaaggagatacacgggatggtgttcggtaaggaactagaccaactaatccgtccgggacgtgaagaccacgtgcgccgactccgggagtctacggacaccagcgctgcggttgccaatgtggtcggtacgattcgtttcggcactcaagagttggctgcacgctctccttggacaatgctcctaaacggaacatcaaactacattcttgatgctgcccgtcagggtgtgcttggggatgtggctggagcggcccttgctgggaaagcctctaagttcggtaaggcaaactaccttaagtctgcctctatcagccctgagcagtggaatggaatcaagcagttgttcagagaccatgcgactcgtggagaagacggtaagttcaccattcgtgacaaacaggctttcgctaacgaccctcgttcgatggacttgtggcgactggctgacaaggtggcggatgagactatactgcgccctcacaaggtttcatcacaggactccaaagcgttcggtgcaggggtgaagatggtgatgcagtttaagaacttcgtcatcaagtcccttaactcccggttcgtccgtagcttctacgaggcaactaagaacaaccgtgcgttagaccaagcgttgacgcatatcatctctttgggtctagctggtggttactacgttgcgcaggcgcaccttaaggccgcaagcctacaggagcacaaacgtaaggagtaccttaagaacgcacttgaccctaagatgattgctcatgcgtcaatctctcgtagttcacacttaggctcaccattgagtatctacgacatgttcgctgggatggttggtagcgatacctataagtacacccgctctactgtactccctaaagagtccgagaagcgtgaccctaacaaggcggtgacaggtagacaggtggcttcaactatcgcaggtgcagttggtgagcaggttccgggtttaggttttgtgggttctgtgggcgcaacagcaattaacgccgcttccctactgtcttctccaaacaaggctaccgctctggagttccgtacaggactcttcaacacctctcgtgagttgatccctaatgacccgctatcgcagcaactcattatgaaaatctacgaggccaacggtatccgtataaaggagacgccgaagaaacaataaaccctcactaaagggagagaggtcacattctggcctcttctctcctaatgctaatttacaaaggaggtcacatggctacaactattaagaccgtgatgacttacccgctggatggctccactacggacttcaatattccgtttgagtatctggctcgtaagttcgtccgagtgacccttatcggtgttgaccgaaaggaactcatcttgaatcaagactatcgttttgcaactaagaccacaatctccacaacgagagcgtgggggccagcggacggttataacatgattgaaatccgtcgatttacctccgctaccgataggctggttgacttcaccgatggttcaatccttcgggcatacgacctgaacatctctcaggttcaaacccttcacgttgcagaagaggctcgtgacttaacggctgataccattggtgtgaacaacgatggcaaccttgatgctcgtggtcgtcgtatcgtaaacgtagctgatggtattgacctcggggatgctatcaatttaggtcaagtcactcggtggaacgagtctgccctgaactctaagaacgccgctgctacctctcaggccgctgccaagacctcagagaccaacgctaagacctctgagaccaacgctaagacctctgagaccaacgctaagacctctgagaccaacgcgtaccaatgggcgcagcgtgctgaggactctccggtacagggtagcgagttctctgcgtatcactactcccgcaaatccgctaagagtgctgccgccgcgagtgtttctgaagataatgctaaggtgtccgagaataactcgaagacctctgagaccaacgctaagacctctgagaccaacgctgcggcctctgctcagacagctaaggatgaggcggctaagctgaccaacatgaatggctttgctgccgctattgattcagtcaacggtaacaatgttgtcatgaagggtgacttcaccattaaaggaaacggtaaagtatcaatactgaaccacagtgggctataccaagataagaccgtgaatggcgtgaactatgccaacaggatttatatggatgatgcaggggccatgcacttcgagaactaccgtgtgtctggtacttcatccaccttacgtgctggttttgttattacagataccaacaggtttgactttacagggccaacgcgagttaatggtgatatcatcgcatatgtggatgctccccctaatccatatcttggccaatatctcaattctgtggcagttcgctcacagcttcggggccgtggtgctaagaatgatccacttggtgcgtactgtggtatgtatattcaggagcacgttggtacagaccacgcgataatccttaacctcaatggttatagcaaggatactaactggcagctattctccaatggtaaaatatctacaccacttggtgatgtgatgacttcgggttctgatattagaatcaaggatgatatcactaaacctcttgatggtgctggtgagcgtattgacgcaattggtatagtggaatacacagagattgccaccggggaacgtaaacgtgggtggctggcccaacagcttgacacgattgacccgctgtacacatacctcacgaccaccgcagaaggtagtcttttgaataccaacgacagggcgttgcttgctgacgtaataactgagcttcaagcactgcgtcaacgcgttaaagaactcgaaggataatcaacaaagccagcggacggcacaacataaggagaacacaatgctttcttttgacttcaacaacgaggtcgttaaggctgcgccgattgttggcacaggggtcgctgatggtgcggcccgactcttttggggactatcgttaaacgaatggttctacgttgcagctatcgcctacacagtggttcagattggtgccaaggtagtcgataagatgattgactggaaacgtgcaaacaaggagtaacctatgagcgacaagactttaatcaagctgctggagatgctagacactgagatggcacagcgtatgcttgctgacctccaaagcgaggagcgccgaacgccgcagctttacaacgcaatcggcaaactgttagaccgccataagttccaaatcagtaagctgaccccggatgagaacatccttggcggtcttgcgtctggtctggaagactacaacaaagtggtcggccctaatggtctgactgatgatgaaacaatcacgctacagtaagtgacatactcaaggttctccacgcggggagcctttatggatgttatttggtgcatctacgtgaaatctaaaaattgatgggaggtgttatgctaaaacttttacgcagcgcactcccttgggtactcgccgggacactctttatgggtggctggcacttagggtcaacccatgagagagcaaactggaaggaggtaatccaaaatgaatacattgcgaaaacaaaggcaaccgcagcaactcaggcagaggtcagtcgggtatcccgtgagtaccaagaagagattgcagccattgaaggcagcactgataggatgcttaatgacctgcgtagtaataataagcggctgtcagtccgcatcaaaacccttaccggactaccagaagataacggtagatgcgagtttaatggtcgagccgaactacacgagtcagatgctaagcgtattatcggaataacccaagctgctgatgctcacgtaagagcgctccagcgtactattaaggagatgcagaatgagcgacacccaagcaaaccgtaatgcgctaatcatcgcgcagcttaagggtgacttcgtggccttcctgttcgtattgtggaaggctttggctctcccgccgccaactaagtgtcagattgatatggcccggtgtctggctaacggagacaacaagaagtttatcctacaggctttccgtggtatcggtaagtcattcatcacctgtgcgttcgttgtgtggacgttatggcgtgaccctcagttgaagatactgattgtctctgcatccaaagaacgtgcggacgctaactccatcttcatcaagaacatcattgacctgctgcccttcttggctgagctaaagcctcgccccggtcagcgtgactctgtgattagtttcgatgttggccctgccaagcctgaccactctccgtctgtgaagtcggtgggtatcactggtcagttgactggtagtcgtgctgatatcatcatagcggatgacgttgagattccgtctaactccgcaactcaaggtgcccgtgagaagctgtggactctggtgcaggaatttgctgcgcttctgaaaccactgccgacttctcgcgttatctaccttggcacgcctcaaaccgaaatgaccttgtacaaggaactcgaagataaccgtgggtacaccacaatcatctggcctgcgctctatccgcgtagccgtgaggaagacttgtactatggcgaccgtctggccccgatgctccgcgaagagttcaacgatgggttcgagatgctccaaggtcaaccgactgaccccgtgcgcttcgatatggaagacctgcgtgagcgtgagttggaatacggtaaggctggcttcactttgcagttcatgctcaacccgaacctgagtgatgccgagaagtaccccttacgcctccgtgacgctatcgtgtgcggtctggacttcgagaaagccccaatgcattaccagtggcttccgaaccgtcagaatcgcaatgaagagcttcctaacgtgggccttaagggtgatgatattcatagctatcattcgtgcagccagaacactggacagtaccagcagcgcatcctcgtgattgacccaagtggtcgcggcaaggatgagactggttacgcagtgttgttcaccctgaacggctacatctatctgatggaagctggcgggttccgcgatggttattccgataagacccttgagtccctcgctaagaaagcgaagcagtggaaggttcagacagtggtcttcgagagtaacttcggggatggtatgtttggtaaggtattcagccctgtgctcctgaaacaccatgcagcgcaacttgaagagattcgtgctcgcggtatgaaggaactacgcatttgtgatacgctggagcctgtactctctacgcaccgccttgtgattcgtgacgaggtgattcgtgaggactaccagactgcccgtgacgctgatggcaagcatgacgttcgctattcgctgttctaccagttgacccgtatggcccgtgagaagggcgctgtggcccacgatgaccgacttgatgcgttagcattgggtgtagagttcttacgctctacgatggaactggacgccgtgaaggtggaagctgaggtgcttgaggcgttcttagaggaacacatggagcacccaatccattcggctggtcacgtagttaccgctatggttgacgggatggaactctattgggaggatgatgatgcgaatagcaacaggttcattgactggtagttatgcatattgagtgcataaggaagcattgaggccacggatggtcactttaagaaattccttaagaatcaatgagtttgaattaaccctcactaaagggagagaggggacttaaagctactatataggttagtcattcaggttatgcaatgaccctttatgcactttaagtctgcctctatgattggtgatattatcattgtataatcaccctaccttagagcaactgaaaggaggtggctcaatgttacgcttgctgattgccctgctgcgtcatagagtcacttggcgatttcttctggtacttactgctgcccttgggtacgcaggtcttactgaccacctcggtcaactggaagtggccttttgctctatactctcttgtggggattaaattgttgttgatgaccgacaagcggctctgagggattcgtaggtatagtttcactacaccaactcatccctgtagagtcaaccctaaaggttatacctaaagatgccctgtagttcgtaatggtcttacagggtcttctggtgtctcctagctatcccttcgggatgcgcctatggtctcacctatggtgtggccttacctaaagtggtttcctaaagagaccctttaagaatttaccacaaaaatctgaatgggtatctcacagttcaagaacccaaagtacccccatagccctcctaaagccacctaaagccagccctacccctctggtttaaccttcggttaaccttgggtatctcctcaagtggcctataggatagcctaaagtgttgcctaaagtcaatacctaaagtggttggtggcttaaggaggacttagagaggccttaaagagtgtcctagtgtaccagttcgatagtacatctctatgtgtccctatctgttagccattcctaaagtaaaccctaaagccactacctaaagccactacctaaagcctccacctaaagagcgacgctatcttaaagacaaccagactgatagacccactgttagcctgtagtgacgccttgtagttatctgtagttatttcgttaaccctcactaaagggaataagggatacttaaagagggaataagggatttaataaaagattaaaattaatggttgactttaagtaacccttaaggctattattcatctcgtcaacgggacaacggccttaaagccactccctgagataccggagtcaaccggataagtagacagcctgataagtcatacgaaaaacaggcattgacaac

SEQ ID NO: 26 - DNA, 39405 bp, Unknown
  source: /note="Description of Unknown: KP2W-P0106 Bacteriophage sequence"
atctgttagcctcctaaagtaaaccctaaagcctccacctaaagaccagacctaaagtaaagcctccacctaaagaccagacctaaagccatcacctaaagagcgacgctatcttaaagacaaccataccgatagacccactgttaacctgtagtgatgccttgtagttgtctatggtgtctatcgtcaattcaattaccctcactaaagggaataagggatacttaaagagggaattagggatttaataaaaagattaaattaatggttgactttaagtaacccttaaggctattattcatctcgtcaacgggacaacggccttaaagccactccctgagataccggagtcaaccggataagtagacagcctgataagtcatacgaaaaacaggcattgacaacatgaagtaaacgcagtaagatgcacaacataacgtcaaccgccaatcggtgtcttctaggtgacttaagcgcaccacggcacataaagcgaaacaaaatggttgacaacatgaagtaaacacggtacgatgtaccacattgaaacgacagtgaggcgggacactgaaagccgctagggtctaacgaaaccagaccgacacgctctttaacaatctggataatagctcttgagtgtaccgatgtataagcgaataactcaaggtcgcactaaaagcgtggcctttatgatattcacttaacacgaactaacatgaggtaacaccaaatgattttcactaaagagcctgctaacgtcttctatgtactggtgtcagctttccgttccaacctcgatgatggggtgaatatgagtcgccaccgccacatggttagcactttacgtgccgcaccgggtctttatggctccgttgagtcaaccgatttgaccgggtgctatcgtgaggcaatcgcaagcgcaccgactgaggaaaaaacggttcgtgtacgctgcaaggacaaggcgcaggcactcaatgttgcacgcttagcttgcaatgagtgggagcaagattgcgtactggtatacaaatcacagactcacactgctggtctggtgtacgctaaaggaatcgacgggtataaggctgaacgtctgccgggtagcttccaagaggttcctaaaggcgcaccgctgcaaggctgcttcacgattgacgagttcggtcgccgctggcaggtggcctaacatgaatcgttattacatcaacgtaccgggctggggtggttctctaacctgctacggatacaacgaacgggacgcacggaaacgttttagagaacaacacggcttcggaaggcttcctaatgggacgcgcctatggctggacgcccgtgattggtaagtgatagactcaaggtcgcactgtatgtgtggcctttatgattatcacttataggactaacatcatgagtaaacttctggcaacatctaaaatagaaggccaatgcaccgtaacactgcgtgagtattaccacgggtcaatgggaagcacctatgttgtgcgatacggtaaacaggtcacacattgggtaaacccgattttagcacaagaggattatcaagcctgtgtgatacaccaagcaacatgtgcgggctggaatgattgacattacaggaggattagcaatggttatatttatcactatcgcactctttgcggtcgcgggctggtactctgagtcacgcaaggccgctcgctatcatcgcaagatggttaaactcatggaacacttggacgcagaagggcgaggccgcgaggctatcgaactggtgaaacacgcatgatgattctctttatcgcactggtctatctgtgcatcgctatgtactttatgcgagacttcaagcgcggtctggtagtccataaggcaacgctgagttactttaagtggggattcatcccacggtttacggttcgtgaacgtaacggacgctttaaggccaacaaggtaggagtattctacattgctacgcactaactcaaagcacgtaaagattgcactgtatgcgatggcttatggtgcatcgaaacgcaaggtcaaacgcatcttaacgagacaccgcaagatgaccgcacgacaggctgcaagcgctgtcaaatgggctgaatttactctttactcttcttacagataacaggacactgaacgatgactttcaccgaagcacaagccgcactcgaagctatccgcaacctaccgattgagcgcctgaacgaacgccagcccatgctggtggctcttgcggctgctatcgtgaacgctgagactcaagacggcgaactgacgcaggccaagggcaattggggtctggagtcgatggactactggcagacactggcggagcgtatgcgtgatgttggtttcgtcaagctgggcaacggtcactttagcgcagcctatgaacacgcactgctaccgggtaaggtaatcaaggtaggctttaagaaagaggactcaggcgctgcctatgctgccttctgccgcatgaatcagggtcgtgagggcatccctacggtgtacgacattcagcgtcatacaggctgctacacggtggtcttggactatctggcaccgcttaacgattggtgctacggtgaaagcgataagattcgccaccactttcaggctgcacgggaaatcattgaggaggattgcttcgataccgccgaagagtacccgataagcgagggcttcattgagacctgcaaggatatccgcaagttcttcttaggcatcgcatcgttcgattgtcacagcgataacatgatgaaagaccagatgggacgcctgattatcgcagacccggtatcattcagcgcagacgacaagttaaagccgggtgagttccactgtgacccggatgaactaatcgccgagattgaggcgctgagagcgcaggaagcgattgaccgctgtaaggcacgcaaggcacgacgtgaccctaacggaacctttcaggcagcacgtaaagcgcgcatcaagtggcgcagaaaggcctctaagcgtgctaaacgtgacgctaaggtactcgctaagatgagcatggacgccaatcagaatcgcagggatgagcctagggcgcgtatggtgtggggcgataagcactggcgcaacgcttggatgcaccacaataacctaaactttgcagaactggagcgccgcgctgctgcggcaatgatgatgcacgatgaggtgcgcattcagtggggcaaaccgttacacatagacgcataccttgacaagcgtctacaaggttgatagagtcttatcttacaggtcatcaaacggtggcctgaataggtacgatttattcacaatgaggtaagcaatgaacatcatcgaaaacatcgaaaagaatgacttctccgaaatcgaactggctactatcccgttcaacacactggcagaccactacggtagcgcattggctcgtgaacaactggctttagagcatgagtcttatgagctaggcgagcgccgcttcctcaagatgcttgagcgtcaagcgaaagctggtgagattgcagacaacgcagccgctaagccattactcgctacgcttctccctaagttaaccgcacgcatcgttgagtggctcgaagagtacgcctcgaagaaaggccgcaagccagtagcctatgcgccactccagttactcaagccggaggcgtccgcgtttatcacactcaaggtcatccttgcgtcactgaccagcacgaacatgacaaccattcaggccgctgctggtatgctggggaaggccattgaggatgaggcacgtttcgggcgaatccgtgacctcgaagcgaagcacttcaagaagcacgttgaggaacaactcaacaagcgccacgggcaagtctacaagaaagcctttatgcaggtggttgaggcagacatgattggtcgcgggctgctgggaggcgaggcgtggtctagctgggacaaggaaaccacgatgcacgtagggattcgcctgattgaaatgctgattgaatccacgggtctggtggaattacagcgccacaacgcaggcaacgcaggctctgaccatgaggcactgcaactggcccaagagtacgtcgatgtgttagcgaagcgtgcaggagcactggctggcatctctccgatgttccaaccgtgtgtcgtaccgccgaaaccttgggtatcaatcacaggtggcggctattgggcgaacggtcgcagacctttggcgctcattcgcactcactctaagaagggactgatgcgctatgaggatgtttacatgccagaagtatacaaggcggtcaacatcgcacagaacaccgcatggaaaatcaacaagaaagtcctcgcggttgtcaacgagattgtgaactggaagaactgcccggtagcagacattccatctctggagcgccaagagttaccgcctaagccggacgacattgacaccaacgaggcagcactcaaggagtggaagaaagccgctgctggtgtctaccgcttggataaggcacgagtgtctcgccgtattagcttagagttcatgctggagcaggccaacaagtttacaaacaagaaagcaatctggttcccttacaacatggactggcgcggtcgtgtgtacgctgtgccgatgttcaacccgcagggcaacgacatgacgaaaggtctgctgaccctcgctaaaggaaagccaatcggtgaggaaggtttctactggctgaaaatccacggtgcgaactgtgcgggtgtcgataaggttcctttccctgagcgcatcgcgttcattgagaagcacgtagacgacattctggcttgcgctaaagacccaatcaataacacttggtgggccgagcaggattcaccgttctgtttcctcgcgttttgcttcgagtatgcaggcgttgcgcaccacggtctgagctacaattgctctctgccgctggcgttcgacgggtcttgctctggtatccagcacttctccgcgatgctccgcgatgaggtaggcggtcgtgcggttaacctgctgccaagcgaaaccgtgcaggacatttacggaatcgttgcacagaaagtaaacgagattctcaaacaggatgcaatcaacggcacacctaacgagatgattaccgtgaccgacaaggacaccggggaaatctcagagaagctcaagctgggaacctcaacgctggcgcaacagtggctggcatacggtgtgacccgtagcgtaactaaacgttcggtcatgacgctggcttacggttccaaggagttcggctttcgtcaacaggtactggacgacaccattcagcctgcgattgacagcggtaagggcttgatgttcacccaacctaaccaagcggctggctatatggctaagctgatttgggacgcggtgagcgtgaccgtagtcgcagcggttgaggcgatgaactggctcaagtctgccgccaagctgctggctgctgaggtcaaggacaagaagaccaaggagattctacgccaccgttgcgcggttcactggactacgccggacggcttcccggtctggcaggaataccgcaagccactccagaagcgtctcgatatgattttcttagggcaattccgtctgcaaccgacgattaataccctcaaggattcaggcattgacgcgcacaaacaggagtctggcatcgctcctaactttgttcactcacaggacggtagtcacctccgcatgacagtcgtttatgctcacgagaagtacggcattgagtcctttgcgctgattcacgatagcttcgggactatcccggcagacgctggcaagctgttcaaggctgtgcgtgaaacgatggtcattacttacgagaacaacgatgtgctggcagacttctatgaccagtttgcagaccagttgcacgagacccaactggacaagatgcctccacttccgaagaaaggaaacctgaacctgcaagacattctcaagtctgactttgcctttgcataacaagcacttagcattaaccctcactaacgggagactacttaaggtctcccactttaagacactttaggtactaagagattaaatttatgattaacattaagactttctttaagaacatctttaagttaaaccgcttgacttccgttaagttctacgcttggatgcccggtagtgatgacctccgcaagactgaatttaagctaggcttagggccgtgcggtaaggtggtcaagaagttggaatgttactcaacgtcctccgggatggtcatcttccagaccactgaggacaacgaaacgaaatccttctactacccgaaaggttcaacgtgtggtcgtatcgaacggacatacagttaaccctcactaacgggagagttagacttaaggtcatcaacaacggtggcctttgtgattaactttcaatacacatcaacatgaggtaagatactatgcgtaccaactttgagaaatttaccaagcgcgattcagtggtcaacgagcatggcgaacagtggcaagagcgccgtgaccgcatgaagaaacgccacaagcaacagcgcggtaactcacagaaacgggagtggaactaatgatgggacgtatctatagcggcaacctgaacgattacaaagatgcggtagcgcgtctacaggaagaccatgacgtgaccgtgaaggtggagccgttcagctatgaaaacccagcgaagatgtgcaggtcatccggtgaggttctccgtgtgttcacacgctccgggcatccggtggcatccagaaccttcgagcacagcgacagcgatgtacaaatcaacgcgcagactgcatggctccgcaaggttcacagcgatttgaaacactggaagtaataaccctcactaacaggagaaacgaaatgagagatatcgaacggttcaacgcaaagactgaaccttgcggcgactgtctacgttggactggtcgaatccagcctaacggttacggacagtttcgcctcgaaggtaaaacacaatacgcacatcgagcagcttacaagctgtttatcggtgaattggacaataaagatacagtcctccactcgtgcgataacaggtggtgtgtgaaccctgagcatttgaccaagggaacgcaggccgataacctgaaagatatggcgataaaaggtaggcaccacgccattaagattccgaacgatgccatcgcgggcatccgtaaagaccctcgctctgctactgtgatagcggctgagtggggcgtccatccaacaaccatccataagattaagtgaaacatcaacaggagattcgtatgaacattttcaagaccgcgccatataaagccgtatcatttgtagagtctgccgtgaagaaagcacttgacaatgctggttatttgatttgcgattgcaaatatgatggtgttcgcggtaacatcgtggttgacaacgtggctgaggctgcatggctgtcccgtgtaggtaagctgattccggcgctggaacatctgaacggtttcgataagcgctggcagcgactactgaacgatgaccgctgcattttccctgatggcttcatgctggatggtgaactgatggtcaaaggcgtagacttcaacacagggtctggcctgctgcgtaccaagtggctcaagaagaacaacttcatgtttgaccgtggtggtgttgagccgctgaaaggttccaaagtagcctttgagttagaccctaagcgcctgagtgtgcgcctgtatgctgtcatgccgattcacattgcggagtctggcgaggactacgatgtacagaacctgctgatgccgtaccatgtggaagccatgcgctctcttctggttgaatacttcccggaaatcgagtggcttatcgctgagacctacgaggtctacgatatggattcgctgactgaactgtacgaagagaagcgtgccgaaggtcacgagggtctcattgtgaaagacccgcagggcatctataagcgaggcaagaagtctggctggtggaagctcaagcctgagtgtgaagctgatggtatcattcagggtgtcaattggggaaccgaaggtttagccaacgagggtaaagtgataggctttagtgtgcttcttgagactggtcgtttagtagacgccaacaacatctctcgcgcactgatggacgagttcacagccaacgttaaagcccacggtgaagacttctacaacgggtgggcctgtcaggtcaactatatggaagagaccccggacggctccctgcgtcaccctagcttcgagaagttccgaggcactgaggacaacccaaaggagaaaatgtaatgcttatctttgatgagaacggttggagggtgtaccaacacccacacctgatgatattccacatatcaaagtggatggaaggagatgaccggagaagctacggtagaacttgggactactttactgtctatgagtgtcatagtattaaggaagtcgaggagtacctacgaaacaatatgtaaacacactggctcaccgaaaggtgggcctttcttcgttccgggggaattaaccctcactaacaggagacacacaccatgtggcttatcctattcgctatcgtcgcaacgctgggattaatggctgccgacgacaacatttggcctgattgttaaggagataacatcatgcgtttacacttcaacaaatccaacggtatcttttcggttcgccgtaaagaccgctcgaccgtattggcctctaagcgcaacgctaagctgcctctgattggctcagtcgctacgctgtcaccttgtgttcacctgctgattactcgcggtgagttcatcaaggcgatgaacaaagagcgtccgcatctggaagccgtggtcacttactggcctcgcgttcgtctgttcttcaagtggattaaggaggtgctgtaatgttacaacatcattggaacaaaccagacttagaggctcgcttcccggttaactctgtggtgcgatactccggcggtggcctcaagcgcatcttagggatgagtggagtggtaactggtcactcgcacacaggtcgcgttaaggttcgcttcggtactcagcacgctgaggttcttccgaacaacctgattccgctaccgaaagctggcgttaagactccgaacgttgaagctcagaagcctgagtctaagtctgacgtgacccatccgaaccactacatgctgttcgacaacgtggaagccattgaggttatcgcccggtcaatgaccgtcgaggcgttccgtgggtactgccttgggaacatccttaagtatcgcctgcgtgctggcaagaaatccgaactggcaactatggagaaagacctcaagaaagctgcattctatcaggaactctttgacaaacaccgggggctgtgttatgacgcttcgtgaatgctgcgattggtgtgccgctaagtggaaccaagctattgaggatggtgacaaggtggctgctgacgcttaccaacaactgtacgcgctgtgggagcggcgctttaaggaggccaataaatgagccagtgtaacaacgggtgccagtacgcgaaggatgtagggatggagaaccactcctgcgcaaatcgctgcatgtactcagaacagaaataccttctaacgattgaaggtaacaccgagtcctttgagattccggtattcgcccggtctctcgaagaggcaacgctacaggctgaacattacgaggacgcagggttcgtagttactcgaatccgtccagaagtgaaagcctaattaccctcactaaagggaacaaccaaaactatcaaccaaaggagaaatactatggctggtttcaagaagaaaatctacacctccggtcttggcactgctgagccttatgcttacctgagtaagccggattatggcaacgaagagcgtggcttcggcaaccctcgtggtatctataaggtagacctgactctttccaataaagacccgcgctgtcaggcgatggtcgatgaaatcgtgaagactcacgaagaggcttatgctgctgccgtggaagagttcgaggctaacccgccgcaggtacagcgtggtaagaaaccactgaaaccttacgagggcgacatgccgttcttcgataacggtgacggtacgactaccttcaagttcaaatgctatgcgtctttccaagacaagaagaccaaagagaccaaacacatcaatctggtcgtggtcgatagcaagggcaagaagattcaggacgttccgattatcggtggtggctctaagctgaaagtgaaatactctctggtgccttacaagtggaacaccgctgtgggcgcaagcgtcaagctgcaactggaatccgtgatgctggtcgaactggctaccttcggtggtggcagtgaagatgagtgggccgatgaagtcgaagatggtggttacactgcgagtgaatcccgtcagtcccgcgatgagcaggagtggcaggaagacgagcacgaagaaaccccggatgatgacgaggacttctaatggctggcgcatacgctgcgcgaggtgtacgcaaggtcggggctttccgctccggcctagaagataaagtctcaaagcagcttgagagtaagggcattaagttcgattatgaactttggagaatcccttacgtcatccctgcgagtgaccacttatacactccagacttcctgctacctaacggtatcttcattgagaccaaagggctgtgggattccgatgaccgcaagaaacaccttttgattcgtgagcaataccctgaactggacattcgcttggtcttctcaagcagccgctcaaagctctacaagggtagcccaacaagctacggtgagtggtgcgagaagcatggcattctgtttgctgacaagctaattccggtggagtggctcaaagaacccaagaaggaggttccgttcgataaatttaagactaagaaaggagtaaagaaaaatggctaaagttcaattcaaaccacgagcaaccacggaggcaatctttgtgcattgctcagcaaccaagccaagccagaacattggcgttcgtgagattcgtcagtggcacaaagagcagggctggttagacgtaggatatcacttcatcattaagcgtgatggcactgtggaagcgggccgcgatgaactggctgtaggttcccacgtgaaaggttacaaccacaactccgtaggcgtatgcctcgtgggtgggattgatgataaaggtaagttcgacgccaactttacacctgcgcaaatgcaagcgctgcgtagtctgctggtcacgctgctggcgaagtatgagggttcaatccttcgtgctcaccatgacgttgcacccaaagcctgcccgtccttcgacttgaagcgctggtgggagaagaacgaactggttacatctgaccgagggtgataccatgaggatgatttgtattcgctgtgataagccgttgaagagtcgtgtaccgtcacgtcagtgtcagtgcaaagacccaatcaaggcggaggaacacaccgaggaataattaacactcactaaagggagacttaacggtttccctttgttctcgcaactgattaaggaatgtacaatggaacgagaagacgatagtatctttctgtttcatgctccatgtgaaaactgtgggtcttctgatggtaactctgtgtactctgacgggcatgaatggtgcttcgtgtgtgaacatcgagtacccgcaaacgaagagcgtgaagcaaagttatcaacgagaagacgtacaggaggcagcaagcctatgagctatgacgtatggaatttcggtgacagcaacggtcgatactctgacctgactgcccgtggcatctctaaggagacgtgccaaaaggctggctactggctggcgaaagtggacaaccgaatgtatcaggttgccgactacagagaccagaacggctccatcgtgtcacagaaggtgcgcgataaggacaagaactttaagaccaccggaagccacaagagcgatgcgttgttcttgaagcacctctggtctggcggcaagaaaattgtggtcactgagggcgaaattgatgcgctcactgtgatggaactccaagactgtaagtacccggtcgtatcattgggtcacggtgcctctgctgctaagaagacatgcgccgctaactatgaatactttgaccagttcgagcagattatcttgatgttcgacatggatgacgcaggccgtaaggcagtcgaagaggccgcacaggttctcccggctggtaaggttcgtgttgccgtgttgccgtgtaaggacgccaacgagtgtcacatcatgggtgaagacaaagcaatcttggagcaggtctggaacgcaaacccttgggtgcctgatggcgttgtctctgcgttgtcactcaaagaccgcgtcaaggaagctatgacctccgaggacgctgtaggtttattatttgatggctgtcaaggtctgaacgatagaaccttgggtgctcgtggcggtgaagtcgttatggttacttccggttccggcatgggtaagtcaaccttcgttcgtcaacaggctctggcttggggcaagcgaatgggtaaacgtgtgggcctagcgatgctggaggaatccgttgaggataccattcaggacatgatgggcttgaacaataaggttcgtctgcgtcagtctgatgaagtcaagaaggctatcgcagaggacggacgtttcgatgaatggtatgatgaactatttggagacgatacgttccacctttatgactcctttgcggaggccgaagctgacaggctgttagcgaagctggcctacatgcgaacaggcttagggtgtgatgttatagtgctcgaccacatatcaatcgtcgtgtctgcctctgaggaatcggatgagcgtaagatgattgaccgcctcatgacgaagctcaaagggttcgctaagtcaactggtgttgtgctcgtagtgatttgtcacttgaagaacccggataagggaaaagcacatgaagaaggacgcgctgtttctattactgacctacgcggttctggtgccctgcgccagctttctgatactatcatcgccttggagcgtaaccagcaaggtgatatgcctaacttggtgttggttcgcctgcttaagtgtcgtttcactggcgacactggaattgctggatacatggaatacaacagagaaaccgggtggcttgaaccgtctagctacactggcgaagaaggagaaggagatactggctggactgaacatgacggacagtcagacttctaaaggatgcccgtgtgggcattccgattgcgatggaatcatgtaccactaattaaccctcactaacgggaacaaccattaaaccataggagacacatcatgtttaaattcattaacgctttaggtaagctggtagttaaactgtacttcatcgaagccaagaagctggacaagaaggccaaagctgattcacagcgagccattgagttggcgaaacagtcccgtgagaaatccgatgcggctgttaatggcatccacaagtcggcagcgattgcagccaaagcacaatccatgagcaaattctttgagtaaggagtgcacattatgagcaagtcaatcacccacgcaaacaccatccgtcttccagacaccgctgaccagttcgctcgtcgagtacacatcaatgtgcgcggtgagaaggtaacgatggtctaccgctggaaagaccacaagtctccgaaagcacacactcaacgcatgaccttggatgacaagcaggtcggtcgcctgatgggtgccctgactatggctgctgacaaggtggtcggtgataaccgtgagcgtctggtagagttcggcgctggtatgcaagagattatcgagaagtgataaactcaaggtcgcccaagggtggcctttatgattatcatttagcacgaaaccaaaggagggcattatgctcgtaagtgacattgaggccaacaacctcttagagaaagtcaccaagtttcactgtggcgttatctatgactaccgtgatggtgagtatcatagttatcgtccgggcgacttcggggcgtatctggatgcgctggaagccgaggtgaagcgaggtgggcttattgttttccataacggtcacaagtatgacgttccggctttagagaaactcgcaaagctgcaactcaatcgtgacttcaagttaccacgtgagaattgtattgacacattggtactctcgcgtttacttcatgcgaaccttaaagacacagacatggggcttcttcgttccgggaaactacccggtcgtcgcttcgggtctcacgctctggaggcatggggttatcgcttgggcgagatgaaaggtgaatacaaggacgacttcaaggctatgctggaagagcagggcgaagaatatgttgacggtgctgagtgggtttcattcaacgagccgatgatggcgtataacgttcaagacgttgtggtcactgtcaagctcttcgagaaattgctgagtgacctccactacttccctgcgggtatggacttcacgaagtacgatgcggatttattctggcgtgaagctggtgagtctgtggatattgaacatcgtgcagcgtggcttttagcgaagcaggagcgtaacggcttcccattcaacaccaaggcaattgaggaactttatgtagaactggcagcgaaacgcgcagaacttctgcgaaagttaacagaaacgtttggctcgtggtatcaaccgaaaggtggtaaggaactcttcaagcacccacggacaggaaaaccacttccgagttaccctcgcgtggtctatccgaaacagggtggcgtgtacaagaagcctcgtaataaggcacagcgcgaaggtcttgaaccttgcgacttggacacgagggattacatggagggtgctccgtatactccggtcgagttcgttacgttcaagccaagcagccgtgaccacattcagaagaaactacaggaggccggatgggttcctgagaagttcaccgagaagggtgcgcctgtggtggatgatgaggtcttggagcatgtacgagtggatgaccctgagaagcaggcgtgcattgacttgattaaagagtacctgatgatacagaagcgtatcggtcaggcggcagaaggtgacaaagcgtggttacggtatgttcaagatgatggtaagattcatggagccgttaaccctaacggtgcagttactggtcgtgctactcatagtttcccaaaccttgcacaagtacccggcgttcgttctccttacggggagcagtgtcgtagcgcttttggtgctgaacatcatttggatgggattactggcaagccgtgggttcaagcggggatagacgccagtggcttagagttgcgctgtctggcacacttcatggctcgcttcgataacggagagtatgcgaatgagattctcaacggtgacattcacaccaagaaccagaacgctgcggaactcccaacgcgagacaacgccaagaccttcatttacgggttcctttacggagcaggagatgagaagattggtcagattgttggggccgggaaggagcgcgggaaggaactcaagaagaaattcttagagaacaccccggcgattgcagcgctacgagaagctatccaacagtctctcgttaagtcttccgcttggattggcggtgagcagaaagtccagtggaaacgccgttggattaagggtctggatggtcgcaaggttcacgtcaggtctccacacgcagcgctcaacacattgttgcagtctgctggtgctctgatttgtaagctgtggattatcaagaccgaagagatgctcattgagaaaggcttgaagcatggctgggatggtgactttgcgcagatgggatggattcatgatgaagtccagattgcgtgccgaacagaagagatagccaaggtcgtcgtagaggtagctcaagaagctatgcgatgggttggcgaacattggaacttccgttgtcgcttagacacagaaggtaagattggcccgaactgggcggtttgtcactaaggagtatttatgggaggcgtggctacactaaggttccacaagatgccgaccgggtgtgtagtctgcgtttcacataagcgcaatcacgatggctacttccggtacagtatagggtcgtccagaaagggcgagaagaaatgctttatgtttcaccgctgggtttgggaacgacaccgtgggcctataccagaagggtacgagatagaccacttgtgtctgaaccgtgggtgctgcaacgtagaacacttgcagtgcatcccgaagcgtgagcacataatcaaaaccaacaaagagcgcaagctcgtaaaggagaaacattatggcaatgaccaaacactttaaagtaaccttcgacgttaccgctgtgattgacagtgaatccgagaagaatctgaacgagttgctggtagacctagctaagaaggccggggctggcgagaagctgaatccgttcaaacaagaactgcttattcaaggcctgacacacgggccggaaggtgctgctgcgttctgtatcaagcaaggtctccgtgagtttatccgcgatggtcacagtgagttaagctctaccgagcagaagctgatgagattctcgcctgcaactgtgcgcgaggtgttcaaatgagtgaatacctgaaagttctggcagctatcaaaggctgccctaagtcctttcagtcgaactatgtgcgaaacaatgcggctctcgtagctgaggccgcttctcgtggacacattagctgtttgactgttggtggtcgtaatggtggagcgtgggaggtcacatccgctggtgtgcgcttcctgaaaagaatgggaggttgcgtatgattatgcctaagagtgacactgtaacgatgactcgcgatgcgtggaacgatgttagcgcatatattgagttccttgaaggtcgcctagcgaaactgaacgcgctggaggcacacggagttgacaactggtgtggttatgatgatgcaaccgctgaactctttaaggaggacgaatgagcctaatcacactgaaagacttcgctgagatgcgcgaaggcaaaccgatggagaagggtgtgctggtcatggatggtgactggcttgtgtatcagtcgatggctgctgccgaagttgagacggattggggtgatgatatttggactctggagtgtgaccacgctaaggctcgtagcattcttgattctgcaatcgagtcataccgaacccgtaagaaggcttggagtgacgctatggttgttctggcgtataccgacgatgtgaactggcgtaaggtactggttgatgagacctataaggagaaccgcaaggcgacccgtaaacctgtgggctaccgtgacttcttagcgaagctgtgggagcgcgatgagttcattcacatcaaagaggacatgcttgaaggtgatgacgttatgggcatcattgggtctggtcacgaggtcttcggcttcaagaaggctgtgttggtctcctgtgacaaggacttcaagactatcccggacgttgacttcctgtggtgtaccactggcaacatcttgacgcagacaaaagagaccgctgattggtggcatctcttccagactatcaaaggtgatatgaccgatggctactccgggattcccggctggggcgatacggcagaaggtttcctgaatgacccgttcattgttgagcctgtagagtccgtgttgaagtccggtaagaacaaggggcagacagtaaccaagtgggtgaagcgtgctcctgatgcgactgagacgctgtgggactgcattaaatccattggtgccaaagctgggatgaccgagcaggaaatcatcaagcaaggccagatggctcgcattcttcgcttcgaggaatacaattacattgacaaggagatttacctatggacgccgcaaagtacataaccatcgctgtgctggtaggtatgctggcgcgaggtctctggatgttcactctcatagtccgagacgtgaagcgagactccgagattaagtgataaactcaaggctctctgtattaaccctcactaaagggaagagggagcctttatgattattactttaagacttaaccttaagaggtgaaattatgttacaaccaattaatcatgttttaactcatcccgatgatattcctagtatgcctcgtgcagctaaagagtatctacaggtgcgcttcaatcagacctatgtgatggagtccggggagtaccgtgcgctacgcgctgctgggtactctgagtctttcattgcgggtgtgatgcatggtctgtaccttgcctctcgaacacttgatgagattgaggtgcgtaaagagcaactgagacaggagtaattatatgtgctggaaaccgaaggtgaaagtccctaagatggacactaaccagattcgcgctgccgaaccagcacctttgactgagccaccgaaatctgtggtatggggaggcgatgacgatgaggacaccagcgtgtcttcctctgaggtgccaacctcaccgagcagcggtaagagcagtcttaaggtaaagctggatgacaacgcagccaagaacaagagtaaatcctccattcgctccaaggcgtttgggtaactgagtcataacatagggagaaacatcatgggattcttcaagaaaatcaagaaggccgttaagaaagtcgtgaaggaagttaccagaccagtcgagaaggcaggtaaggaagtcggtaaagtcgttggcggtgcgctgggtacaggtaagcaggagattatccaacaagaggctccagcaccagtagtgactgcgccacctccagcacagattgtagatgtacctgaacaggataaggctgagggtgaggatgaggctcaaaccgaaagcgcacgtaagaaagcacgcgctggcggtaagaaggcacttagcgtagcccgtagctccggcggtggcattaacatctaaggaggactgaatggctgattcaaaacgtacaggcttgggcgaagacggtgctaaagctacctatgaccgcctaacgaacgaccgtagagcctatgagactcgtgcggaaaactgtgcgcaatacaccattccgtccttgttcccgaaggagtccgataacgaatctaccgactacacgactccgtggcaggctgtaggtgcgcggggtcttaacaatctggcctctaagttaatgcttgcgttattcccgatgcagtcgtggatgaagctgaccattagcgaatatgaggcgaagcagcttgttggagaccctgatggactcgctaaggtggacgaaggtctgtctatggttgagcgtattatcatgaattatatcgaatccaacagctaccgtgtgacgctctttgagtgcctcaagcagttgatagtggcaggtaatgcactgctttacttaccggaacccgaaggtagctacaatccgatgaagctgtaccgattgtcttcttatgttgtccaaagagacgcatacggcaatgtgttacagattgtcactcgtgaccagatagcctttggtgctctcccggaagacgttcggtctgcggtagagaaagctggtggtgagaagaagatggacgaaatggtcgatgtatacacccatgtgtatctcgatgaagagtccggcgattacctcaagtacgaggaagtagaggaagttgagattgatggctccgatgccacatatccgactgacgctatgccctacattccggttcgcatggttcgcattgatggcgagtcttacggtcgctcctactgtgaagaatacttaggtgacttaaggtctcttgagaatctccaagaggctatcgttaagatgagcatgattagcgctaaggtcatcggtctggtgaacccggctggcattacgcagccacgcagattaaccaaagctcagactggtgacttcgttcccggtcgtcgagaagacattgacttcctccaactggagaagcaagctgactttaccgtagcgaaagctgtgagtgaccagatagaagcacgcttatcgtatgcctttatgttgaactctgcggtacagcgcacaggtgaacgtgtgaccgccgaagagattcgatacgttgcgtcagaactggaagatacgcttggtggcgtctattcgattctgtctcaagaactgcaattgcctctggttcgtgtgctcttgaagcaactccaagcaacctcgcagattcctgagctaccgaaagaagccgttgagcctactatcagtacaggtctggaagcaatcgggcgtggtcaagacctcgataaactggagcgctgtatctccgcttgggctgctctggctcctatgcagggagacccggacattaaccttgctgtcattaagctgcgcattgctaacgccattggtattgatacttctggtatcctactgacggacgagcagaagcaagcactgatgatgcaggatgctgcccaaacaggtatcgagaacgctgccgccactggtggggctggtgtgggtgctctggcgacctcaagtccagaagctatgcagggtgccgcagcacaggctggcctagacgccacctaataaccctcactaaagggagacctcatctttgaaatgagcgatgactaaaggttggagtcctttggtttccctttatctttaacaacttaggagatttaacaatggctgaatctaatgcagacgtttatgcgtccttcggtgtgaacaacgcggtaatgaccggaagcacacctactgaacacgaacagaatatgctgagtctcgatgttgctgcccgtgatggcgatgatgcaatcgtacttagcgaggaaccgacttctcataacgatgacccatatgcatccggtgtagacccgttcgctgatggtgaagacgatgagggccgcattcaggttcgtatcagtgaagatggtaatgaagccgagttcgacactggtagcgataacgctgaggtggagaccgaaggtgaggccgctgagtttgaaccgctgggtgacactccagaagaactgagccaagtgactgaacaattaggtcagcacgaagaaggctttcaggcgatggtcgagcaggccgttgagcgtggactgagcgcagagtctgtgactcgcatctacgaagagtacgaagccgatggtatctctgagaaatcctacgcggaactcgaagctgctggatatagtcgtgcctttgtggactcctacatctccggtcaggaagcccttgtagaccagtacgtcaatcaggtagttgcctttgctggtggtaaggagcgctttagcgcaatccatacgcaccttgaagcaaccaacccggctgcggctgagtcccttgaggctgccatgatgaaccgagacttggcgactgtcaaagcaattatcaatctggctggtgagagttacacgaagaaattcggtaagcctgccaaccgtagtgttgccaagcgtgctactccggttaaacctgtagctcgtcagaaagagggctttacgaatcaggctgagatgattaaagctatgagtgacccacgttaccgtagtgatgctgcctaccgtcaaatggtagaacagaaggttatcgactccagtttctaattaaccctcactaaagggagagaccatagatgcctacaatggttgaatcacctgagcacagaactttgtggtcactcccgtaggtgaaacattgagaaccaactcgattcaagtagtaaccaaacttttctttaaattaacataaggagattcaacatggctaacattcaaggcggacagcaaattggtactaatcagggtaagggtcagtccgcagcggacaaattggcgctgttcctgaaagtgttcggcggtgaagtcctgacggctttcgctcgcacctccgtgaccatgcctcgtcacatgctgcgctctattgcttctggtaagtccgcacagttccctgtgattggtcgcaccaaagctgcttacctgaaaccgggtgagaacctcgatgacaaacgtaaggatatcaaacacaccgagaaggtaatccacattgatggcctgctgactgcggacgttctgatttacgacattgaggacgcgatgaaccactacgacgttcgcgccgagtacaccgcacagttgggtgaatctctggcgatggcggctgacggtgctgtactggctgaactggctggtctggttaacctgcctgacgcctccaatgagaacatcgagggtctcggtaagcctaccgtactgactctggttaagccgaccacaggcgacctgactgacccggttgagctgggtaaagcgattatcgctcagttgactatcgcgcgtgcgtctctgaccaagaactacgttccggctgctgaccgtaccttctacaccactcctgataactactctgcgattctggctgccctgatgccgaacgctgcaaactatcaggcactgattgaccctgagcgcggtactatccgtaacgtgatgggcttcgaagtggttgaggttccgcacctgaccgctggtggcgctggtgatacccgtgaggatgccccggctgaccagaagcacgctttcccggcgacttccagcactaccgttaaggttgctctggataacgttgttggcctgttccagcaccgctctgcggttggtacggtcaagctgaaagacttggctctggagcgcgctcgtcgtgcgaactatcaggctgaccagattatcgctaaatatgcgatgggtcacggcggtctgcgtccagaagctgctggcgctatcgttctcccaaaggtgtcggagtaattcccgaccccactggagttactcttagtcagaagactatgagcttagacgttggggcttctaaagccctgacttctacggtaactccggctgatgcagtacagacagtgacctttacgtcttccaatgcgaagattgccacggtcgatgcctctggtactgtaactgctgtgggcgctggctccgctgacatcactgcgactactgtgaatggcctgacggctgtctgcaaggtcactgtgaaagcagtagagcctcccgtagaaggctaaggtctttaccggggatttactttccttcattactttatgaaccccttgggtgccctctgagggtatctgaggggttttttgctttaaaccctcactaacaggaggtaacatcatgcgctcttatgagatgaacattgagaccgcagaagagctatcagccgtcaacgacattctggcttccatcggtgagccaccagtatcgacacttgagggtgatgcgaatgctgacgttgcgaatgctcgacgtgtactcaataagattaaccgacagattcaatcacgaggatggacattcaatattgaggaaggtgtgactcttctaccggatgcgttctctggtatgattccatttagctctgactacctgtccgtaatggcaaccagcggtcagacccaatatatcaaccgtggtggctatctctatgaccgctctgcgaagactgaccgattcccatctggtgttcaggtcaacctgattcgtctgagagagttcgatgagatgccagagtgcttccgaaactacatcgttaccaaggcttcccgtcagtttaacaaccgcttcttcggtgcgccggaggtagacggagtgttgcaggaagaagaacaggaagcgtggcgtgcgtgcttcgagtacgaactagactacggcaactacaacatgctggacggtgatgcattcacctctggtctacttaaccgctaataacaaggaggctctatggctctcattagtcaatcaatcaagaacctcaagggtggtatcagccaacagccagatattctccggttcgctgaacaaggtagcgtacagattaacggttggtcttctgagtcagagggtctccagaagcgcccaccgatgattcaccttaagacccttggcgctgctgggtatgtgggtgcgcaaccttacgtgcatcttatcaaccgtgatgagttcgagcagtatttcgttgtgttcactggtgaagacattaaggtgttcgacctcgatggtaaggagtatcaagtccgtggagaccgctcatatgttcgtacagctaacccacgagaagaccttcggatggtaactgtggctgattatacctttgtgaccaaccgcaaggtggttgtgcagagtaacgaccaatcggtcaaccttccgggctttaaagaccaaggcgatgcgctaattaatgttcgtggtggacaatatgggcgtagactatcaatcgagttcaacggggctgagcgtgctgctgtgcagctaccagatggttcacaacccgcacacgtcaatgaggttgacggtcaggctatcgctgagaagctggcggtgcagttgaggaacaaccttgggaatccaaacaataagcaagacccgaataagtggcgcttcaacgttggccccggattcatccacatccttgcgccaaataacgataacgtttggggactacagactaaggatggttatgcagaccagctaatcaaccctgtaacccattacactcagtcgttccagaagttgcctattaacgctccagatgggtacattgtgaagattgtaggtgacacctcaaagactgccgaccagtattacgttaggttcgacctcaaccgtaaggtatgggtagaaacaatcggctggaacacaaggactcacctacattaccacactatgccttgggcgctggtacgtgcttctgacgggaactttgacttcaaggtacttgagtggggtgctcgtactgtgggcgatgatacaaccaacccatacccatcgtttaccggacagacaatcaacgatattttcttcttccgtaaccgtttaggcttccttagcggggagaacatcatcttgtctcgcacctcgaaatacttcaacttcttcccggcctccgtgtctaactactctgacgatgacccaatcgacgttgccgttagtcacaaccgggtgtcaaccttgaagtatgccgttccgttctccgaagagttgctcctgtggtctgaccaagcgcagttcgttctgacggcctctggtatcctttcgagtcgctccgtagagttgaaccttacgactcagttcgacgtacaagacagggcacgcccacatggtgtaggacgtaatgtatactttgcatcacctcgcgcttccttcacatccattaaccgatactatgcggtacaggatgtaagctctgtgaagaacgcagaggacatgacggctcacgttccgaactacataccgaatggagtattcagtatatcgggtacaaccgctgagaacttcgcggctatccttacgagcggagcaccgaaccgggtgtatatctacaagttcctctatattgatgaagaaatcaggcagcagtcgtggtctcattgggactttggggacaacgttacggtgtttgcagcacaggtgataaactcaacaatgactgtattgatgagcaacgaacatgctgtgtggatgggacgcttgcacttcacgaagaactccatagacattccgggagagccttacagattatacatcgacgctaagaggaaatacaccatccctgccgggacgtataatgatgatacctaccagacgtccataagcctcgcagcgatttatgggatgaacttcactaagggtaaagtgtctgtggtcttccccgatggaaagattatagaggtagacccgccaatcaacggttggggcagtgacccggtgttacgacttgatgggaaccaagagggccaagtggtttacattgggttcaacatcccattcacgtatacgttctcgaagttcctcattaagaagactgctgaggacggctcgacggctaccgaggatattggtcgcttacagcttcggcgtgcgtgggtaaactatgaggactctggagcgttcaccatccgcgtgaacaacctgtcccgtgagttcatctacacaatggctggtgctcgcttgggttctgacaatctgcgtgttggtaggtcgaacattggcacagggcagtaccgcttcccggtggtaggtaatgcgcagacgaacatagtaactatcgagtcagatgcgtcaacaccactgaacatcattgggtgcggctgggaggggaactaccttcgtcgttcttctggcatttaacttaaagtctccctgcggtgaattaaccctcactaaagggagacactaatagatacgaggggttaaagcattatgtatattacaaagtgtttacaagtccacgctgacaactttcagccgtccatagaggacattctggaagctgaggcattgggtgtcgaacctaaagtaattcctgatgagaacactgtggcaatgctcagcgatggcgctgtgttggcaatcggtggcaatcagggagaccgagtgtggttccttacctctaagtacgtcccactgtttaccttgaaggagcgcttagagtttcgtaagttaatagttgaatatcgtgatatgatgctgaaccagtacgagtccatttggaatttcgtttgggtaggcaataagtcacacattcgtttcctaaagacaatcggagcggtattccacaacgagtacacactcgatggtcagttccaactattcacaatctcaaggaggcaacgtgaagaaatgtaagaaatgcggagagttgaaagctgtctccgagttctataaggacaagaagagtaaggacggcctacggagtcattgtaagccctgtcactacacgtattacaagaaggactactcaaaggcgcgagagatgaaccttaagcgtctgtacggaatcactctggaagaatacgaagcgatgctccttaagcaagacggagcgtgtgctatctgcggtcttaccgagagagttgagggacgggcgttagcggttgaccattgccacgccactggcgctgttcgtggtctcctttgctctgcctgtaacatcgctcttgggaaattcgaggacgacaccgagcgtcttcggaaggcaatcacttacctaagaggagaataattatgtgctggatggcagcgattcctatcgccatgatgggtgcccaagctctgagtagccagaacagcgctgataaggcgcgagtggcacagaccgaagctggacgccgacaggcaatggagatggtcaaagagatgaatatccagaatgcaaacgcctcgctggaacaacgggacgcccttgaagctgcatcctctgagttgacttcgcgtaacatgcagaaggtacaggctatgggaacaatccgtgcagctatcggcgagagtatgctggaaggtgagtccatgaagcgcatcaagcgtatcgaagaaggtaactacatccgggaggcaaatagtgtcaccgagaattaccgccgagactacgcgagtatctttgcgcaacagttgggacgcactcagtcaacagcaagtcaagtcgatgcaatgtacaagagcgaggccaagggtaagtctggtctgatgcgtgtactagaccctttgtccattatgggtcaggaagctgcaagtcaatatgcggctggtggatttgacaagaaaggtggaaaccaagcagcacctatcagtgccgccaaaggaaccaagaccgggaggtaataatggctagtaaactaaatagtgttttaggcaacatggcgactcccggtatggaacgactccggggcgtcaaaggtatggactaccgggcagcaaccattcaggctgagcaaccaagagcgagtcttctggactccctaggtcgattcgctaaggctggtgccgatatgtacatggcgaaagaggaacgtgataagcaacgagccgatgagcgctccaacgagattatccgtaagctgacccctgagcagcgccgacaggctatccagaatggtacattactgtatcaggatgacccatacgcaatgcaagccttgaagttcaagaccgggcgtaacgctgcgttcctcgttgacgatgaggttcaacaggccatcaaagagggtcgcttccgtactcgtgaggagatggagcagtatcgtcactcacgcctacaggagcactcgaaggcgttcgctgagcagttcggcatcaatgagatggacgaggaataccagaagggtttcaacgcgaatatcaccgagcgtaacattgctctgtatggcgcacatgataccttcctgagtgaccaagcgcagaagggtgcaatcctgaactcgaaggttgaactcaatggtgtcctgtctgaccctgacctactgtctcgtcctgagtccggtgagttcttccagaactacatcgacaactccttggtgacagggatgactgacaatcaggctcaacaggttatctcttcgtccctgaatgacgtgctacagcgtccgggtggtgccgccttcttgcagaacattgagaaccgcaaggtgactcttaatggtgctacgactacctatcgtgaactgatgggtgatgagcagtggcaggcaatgatgattaaggcacagcacactcaattccagaacaacgcgaagttaaccgagaagttccgactggatattaactcagcgcttaaccaagcggacactggtaaaggatgggagactcttcaaggcatcaaggccgaactcgataagattcagccgggtgaagagatgactcctgagcgtgagtggttgatttccgcacaggaacagatgcgcacacgcttcaagcaggaacaggctgagacagcaaagctgatggacaagcaacagaagaccctgaataaatctttggtcatcgacaagcagttccagaagcgcctcaacggtgaatacgtctcgaccaactataaggacatgccgaccaacgagaacactggtgagtttacacatagcgatatggtaaactatgcgaaccagaagttagcggaaatcgaagcgatggacttaacgccagaacagaaagacaaactgaaattggactacctacgggcagactccaaggagggtgctttccgtgcagcgtttggtgagatgattactgatgctggaaacgaatggcaggctgcggtgattaacggtaagatgcctgagagcacaccagcgatggataaccttcgtcgcatccgcaacactgaccctgacctgattgcctctctgtatcctgacaaggccgagttgttcctgacgatggacatgttggataaccaaggcatcgacacgcaggttcttatcgacgctgataaggcccgcgcacagaagaccaaggagatgcagtttgaggatgaccgagcgtgggctgctatgatgaacgattcaacgaatcctcaaatcaagtacatgccttcgagtgtccaagggtatgcccggaagatttatgattccgtgaagtaccggacagggaaccctgacatggcaaccgaacaggtcgcaaagttcctctccgattcgacgaccacgttctccagtagcgatgttgagggtgatacctacggcgtcctaccgaagaacatcctgactgtttcggatgaccctaagtcgtgggagcaagggaagaacattctggacgaagccattaagggaatcacagcggcgaacccttggattaccaacaagcaactgtcggtgtaccagcaaggtgattcaatctacctgatggacacaaccggacaggttcgcattcggtatgaccaagagttactcaaacgcgaataccagcgtaccgcacagatgcaagctgaggcagcgcgagagaaagctctcaaagaggccaataagcgtgctccaatcagtcgcgcaacgcaggcgcgtgaagaagcgcgtaaacgtgtccaagagaaacggaagaagactccgaagtacatctatggacgtaaagaagactaacagtgataaggaggctccatgagctacgataagaacaaacctagcgagttcgatgggttatttcaaaaagcggcagacaatcatggggtctcctatgacctgcttcgtaaattagcattcaacgaatccagctttaatccaaaggccaaatccccaactggcccgaagggtctcatgcagttcaccaaaggtacagccactgcgcttggcctcaaggttactgacgatgatgacgatgaccgttacaaccctgagttggctgtggatgcagccgctcgtcacctgagtgacctcattcggaagtacgatggggatgagcttaaggcagccctagcatacaaccaaggcgaggggcgcaacggtgctccacagatacaggcctacgacaaaggtgattgggcttcaatctctgaggaaggtcgtaactatatgcgtaacctgatggacgtagctaacagtcctcgcaagggggacttggaggcgttcggcggtatcaccccaaaggctaagggcattccatcgggggatgcatttgctggaatcgggaagaagcagacggtaggcactgacctgccggagtcaactggattcaaagtggagggtaaagagcagaaagcacctaacgtgccttatgccaaggacttttgggaaaagactggaacaacgctggacgagtttaattcacgttcgaccttcttcggaatcggagatgccacgagtgcagaacttcacaactccgtattgggtgtggcttttcgtgccgctcgtagtgatgacggttttgatttattcaaggacaccattactccgactcgctggaacagccatacgtggactccagaagagctagagcgtatccgtaaggaagtgaagaacccatcgtacatcaacgtagtcactggaggctctcctgagaatctggacgccctcattaagatggcgaatgacaactatgagatggacgcacggtctgccgatgctggtgttggtgccaaacttactgctggtatcgtcggtgctggtgtagacccgctgagttacgtgccgctagtaggcgtagccgggaagggtctcaaggtggttaacaaggctttcattgtgggtactcaaagtgctggcctcgcggttgcctctgagggtatccgtacatcaatcgctggtggagaagcccactatgctgatgctgctttaggcggtctgatgttcggtgctgggatgagtgcaataagcgatgctatcgcggctggtattcgccgttcccgtgggactgaggttgttaatgacttcgctcctatggcacaccgcttggaagcccgcgaaaccgctctgaactctggtggtgaagacctgacccgtatgcctagcgagaaccgtgtgttcgaccgtgagcacgctggagttgagtattcccctctggagaccgagccgggtgccgttgtgttgcctcaaggtcaaatcctgagcgacaccaacccactcaaccctcagactcttagcgagttcgaggcggtcaaccctgagcgtgccgctcgtggtatctctttgggcggtttcactgagattggcttgaagactctccgctctgagaacccgactgttcgctccattgcgagtgaccttgtgcgttctccgacagggatggaatcaggctctaatggtaagttcggtgcgactgcttctgacattaaggagcggctccacgcgaacaatcagcgcacctacaatcagctttatgatgctgtgcgtactgcaatgaaagaccctgagttctccacaggtggggccacaatgagccgtaaggaaatccgacaggaaatctacaagcgtgcagccttggcgattgagcgacctgagcttcaagcaaacctgacaaagggtgagcggaacgtgatgaacatcctcaagcagcactttgacctcaaacgtgaaatcatggagaacccgtcaatcttcggcaacaccaaggcggtcagtatcttccccggctcacgccacaagggaacctacgtgccaaacgtgtacgaccgcgctataaagattgagatggttaaacgttacggtaatgatggcttgcagcgagcaatcgcggagtcatggttgacgtcttatcgtgctcgtccagaagtcaaggcgagggtcgatgagtacctgatggaacttaacggtctcaaatccgtgcaggaagttacgcctgagatggtgcagaagcacgcgatggataaggcgtatggtatttcacacaccgaccagttctctgcctcctctgtcattgaggataacattgagggtctggtgggtatcgagaataacaacttcttggaagcccgtaacatgttcgacagtgacatggcggtgactctccctgatggtaacacgttctctgtgaatgacctccgtacctatgacatggctgaaattctacctgcatacgaccgacgagtggatggtgacgtggcaatcatgggtggttccggtaagacgactaaagacctgaaagatgaaatcatggcgctggataagcagtcagagggtaacggcacactgaaaggtgaagtggaagccctcaaggacaccgtgaagattctaactggtcgcgctcgaaggaacccggaaggcgcttggggaacagccctacgctccgtcaatgaccttacgttcttcgctaagaacgcctacatgggcgcacagaacattactgaaatagctggtatgctggctaaaggtaacgtctctgcgataactcacggaatacccatgattaacgattgggtcaaccgtggtaaaccgcttcgtgcctctgagattaaggagatacacgggatggtgttcggtaaggaactagaccaactaatccgtccgggacgtgaagaccacgtgcgccgactccgggagtctacggacaccagcgctgcggttgccaatgtggtcggtacgattcgtttcggcactcaagagttggctgcacgctctccttggacaatgctcctaaacggaacatcaaactacattcttgatgctgcccgtcagggtgtgcttggggatgtggctggagcggcccttactgggaaagcctctaagttcggtaaggcaaactaccttaagtctgcctctatcagccctgagcagtggaatggaatcaagcagttgttcagagaccatgcgactcgtggagaagacggtaagttcaccattcgtgacaaacaggctttcgctaacgacccacgttcaatggacttgtggcgactggctgacaaggtggcggatgagactatactgcgccctcacaaggtttcctcacaggactccaaagcgttcggtgcaggggtgaagatggtgatgcagtttaagaacttcgtcatcaagtcccttaactcccggttcgtccgtagcttctacgaggcaacgaagaacaaccgtgcgttagaccaagcgttgactcatatcatctctttgggcctagctggtggttactacgttgggcaggcgcaccttaaggctgcaagtctacaggagcacaaacgtaaggagtaccttaagaacgcacttgaccctaagatgattgctcatgcatcaatctctcgtagttcacacttaggctcgccattgagtatctacgacatgttcgctgggatggttggtagcgatacctataagtacacccgctctactgtactccctaaagagtccgagaagcgtgaccctaacaaggcagtgacaggtagacaggtggcttcaactatcgcaggtgcagttggtgagcaggttccgggtttaggttttgtgggttctgtgggcgcaacagcaattaacgccgcttccctgctgtcttctccaaacaaggctaccgctctggagttccgtacaggactcttcaacacctctcgtgagttgattcctaatgacccgctatcgcagcaactcattatgaaaatctacgaggccaacggtatccgcataaaggagacgccgaagaaacaataaaccctcactaaagggagagaggtcacattctggcctcttctctctcttaatgctaatttacaaaggaggtcacatggctacaactattaagaccgtgatgacttacccgctggatggctccactacggacttcaatattccgtttgagtatctggcgcgtaagttcgtcagagtgacccttatcggtgttgaccgaaaggaactcatcttgaatcaagactatcgttttgcaactaagaccacaatctccacaacgagagcattggggccagcggacggttataacatgattgaaatccgtcgattcacctccgctaccgataggctggttgactttacggatggctcaatcctccgtgcgtatgacctgaacatctcgcaggtgcagaccctccacgttgctgaggaagcgcgtgaccttaccgctgatacgattggcgttaacaacgatggtgacttggatgctcgtggtcgtcgtatcgtgaacgttgcggacgctaaagaccccggtgatgcaataactttaggtcaagtctctcgatggaatgagtcggcactgaactctgcgaatgctgctgctgcatctcaacaggccgctgctgcatctcaacaggccgcaaagtcctcagagaacaactcgaaggtatctgaggacaacgcaaagacctccgagaacaacgcgcatcaatgggcgcagcgtgcagaggactctccggttcagggtagcgagttctctgcgtatcactactcacggaaggcctccaagagtgccgccgccgcaagtacgtctgaggggaatgcaaagacctctgagaccaacgctaagtcctctgagaccaacgctaagtcctctgagactaacgctgcatcgagtgctgctaaggcttctgaggaggctgctaagctgactaacatgaatgactttgctgctgctattgattcagtcaacggtaacaatgttgtcatgaagggtgacttcaccattaaaggaaacggtaaagtatcaatactgaaccacagtgggctataccaagataagaccgtgaatggcgtgaactatgccaacaggatttatatggatgatgcggggggcatgcactttgagaactaccgtgtgtctggtacttcatccaccttacgtgctggttttgttattacagataccaacaggtttgactttacagggccaacgcgagttaagggtgatatcagcgcatatgtggatgcgccacctaatccaggtattggccaatacctcaattctgtgtcagttcgctcacagcttcggggccgtggtgctaagaatgatccacttggtgcgtactgtgctatgtattttcaggagcacgttggtacagaccacgctataatccttaacctcaatggttatagcaaggatactaactggcagctattctccaatggtaaaatatctacaccacttggtgatgtgatgacctcaggttctgatgttagaatcaaggatgatatcactaaacctcttgatggtgctggtgagcgtattgacgcaattggcatagtggaatacacagagattgccaccggggaacgtaaacgtgggtggctggcccaacagcttgacacgattgacccgctgtacacatacctcacgaccaccgcagaaggtagtcttttgaataccaacgacagggcgttgcttgctgacgtaatcactgagattcaggcactgcgtcaacgcgttaaagaactcgaaggacaatcaacaaagccagagggcggcacaacataaggagaacaagaatgttatcttttgacttcaataacggggtcgttaaggctgcgccgattgttggcacaggggtcgctgatggtgcggcccgactcttttggggactatcgttaaacgagtggttctacgttgcagctatcgcctacacagtggttcagattggtgccaaggtagtcgataaaatgattgactggaaacgtgcaaataaggagtaacctatgagcgacaagactttaatcaagctgctggagatgctggacacggagatggcacagcgtatgcttgctgacctccagagcgaggaacgccgaacgccgcagctttacaacgcaatcggcaaactgttagaccgccataagttccaaatcagtaagctgaccccggatgagaacatcctcggtggactggcggctggtctggaagactacaacaaagtggtcggccctaatggtctgactgacgatgagactatcacgctacagtaagtgacatactcaaggttctccacgcggggagcctttatggatgttatttggcgcatctatgtaaaatctgaaaattgatgggaggtgttatgctaaaacttttacgcagcgcactcccttgggtactcgccgggacactctttatgggtggctggcacttagggtcaacccatgagagagcaaactggaaggaggtaatccaaaatgagtacattgcgaaaacaaaagcaaccgcagcaactcaggcagaggtcagtcgggtatcccgtgagtaccaagaagagattgcagccattgaaggcagcactgataggatgcttaatgacctgcgtagtaataataagcggctgtcagtccgcatcaaaacccttaccggactaccagaagataacggtagatgcgagtttaatggtcgagccgaactacacgagtcagatgctaagcgtattatcggaataacccaagctgctgatgctcacgtaagagcgctccagcgtactattaaggagatgcagaatgagcgacacccaagcaaaccgtaatgcgctaatcattgcgcagcttaagggtgacttcgtggccttcctgttcgtattgtggaaggctttggctctcccgccgccgactaagtgtcagattgatatggcccggtgtctggctaacggagacaacaagaagtttatcctacaggctttccgtggtatcggtaagtcattcatcacctgtgcgttcgttgtgtggacgttatggcgtgaccctcggttgaagatactgattgtctctgcatcaaaagaacgtgcggacgctaactccatcttcatcaagaacatcattgacctgctgcccttcttggctgagctaaagcctcgccccggtcagcgtgactctgtgattagtttcgatgttggccctgccaagcctgaccactctccgtctgtgaagtcggtgggtatcactggtcagttgactggtagtcgtgctgatatcatcatagcggatgacgttgagattccgtctaactccgcaactcaaggtgcccgtgagaagctgtggactctggtgcaggaatttgctgcgcttctgaaaccactgccgacttctcgcgttatctaccttggtacgcctcaaaccgaaatgaccttgtacaaggaactcgaagataaccgtgggtacaccacaatcatctggcctgcgctctatccgcgtagccgtgaggaagacttgtactatggcgaccgtctggccccgatgctccgcgaagagttcaacgatgggttcaagatgctccaaggtcaaccaactgaccccgtgcgcttcgatatggaagacctgcgtgagcgtgagttggaatacggtaaggctggcttcactttgcagttcatgctcaacccgaacctgagtgatgccgagaagtaccccttacgcctccgtgacgctatcgtgtgcggtctggacttcgagaaagccccaatgcattaccagtggcttccgaaccgtcagaatcgcaatgaagagctacctaacgtgggccttaagggtgatgatattcatagctatcattcgtgcagccagaacactggacagtaccagcaacgcatcctcgtgattgaccctagtggtcgaggtaaggatgagacaggttacgcagtgttgttcaccctgaatggctacatctatctgatggaagctggcgggttccgcgatggttattccgataagacccttgagtccctcgctaagaaagcgaagcagtggaaggttcagacagtggtcttcgagagtaacttcggggatggtatgtttggtaaggtattcagccctgtgctcctgaaacaccatgcagcgcaacttgaagagattcgtgctcgtggtatgaaggaactacgcatttgtgatacgctggaacctgtgctctctacgcaccgccttgttattcgtgacgaggtgattcgtgaggactaccagactgcccgtgacgctgatggcaagcatgacgttcgctattcgctgttctaccagttgacccgtatggcccgtgagaagggcgctgtggcacatgatgaccgacttgatgcgttagcattgggtgtggagttcttacgctctacgatggaactggacgccgtgaaggtggaggctgaggtgcttgaggcgttcttagaggaacacatggagcacccaatccattcggctggtcacgtagtcacctctatggttgacggtatggaactctattgggaggatgacgatgtgaatagcaataggttcattgactggtagttatgcatattgagtgcataaggaatcatttagaccacggatggtcactttaagaaattccttaataatcaatgagtttgaattaaccctcactaaagggagagaggggacttaaagctactatataggttagtcattcaggttatgcaatgaccctttatgcactttaagtctacctctgtgattggtgatattatcattgtataatcaccctaccttagagcaactgaaaggaggtggctcaatgttacgcttgctgattgccctgctgcgtcatagagtcacttggcgatttcttctggtacttactgctacccttgggtacgcaggtcttactgaccacctcggtcaactggaagtggccttttgctctatactctcttgtggggattaaattattgttgatgaacgacaagcggctctgagggattcgtaggtatagtttcactacaccaactcatccctgtagagtcaaccctaaaggttatacctaaagatgccctgtagttcgtaatggtcttacagggtcttctggtgtctcctagctatcccttcgggatgcgcctatggtctcacctatggtgtggccttacctaaagtgggttcataaagagaccctttaagaatttaccacaaaaatctgaatgggtatctcatagttcaagaacccaaagtacccccccatagccctcttaaagccacctaaaaccagccctacccctagggtttaaccttcggttaaccttgggtatctcctcaagtggcctataggatagcctaaagtgttgcctaaagtcaatacctaaagtggtggatggcttaaggaggacttaaagagtgtcctagtgtaccagttcgatagtacatctctatgtgtccct

SEQ ID NO: 27 - DNA, 39030 bp, Unknown
  source: /note="Description of Unknown: KP2W-P0107 Bacteriophage sequence"
gatattgacttcctgcaactggagaagcaagctgactttaccgtagcgaaagctgtgagtgaccagatagaagcacgcttatcgtatgcctttatgttgaactctgcggtacaacgcactggtgaacgtgtgaccgccgaagagattcgatacgttgcgtcagaactggaagatacgcttggtggcgtctattcgattctgtctcaagaactgcaattgcctctggttcgtgtgctcttgaagcaactccaagcaacctcgcagattcctgagctaccgaaagaagccgttgagcctactatcagtacaggtctggaagcaatcggtcgtggtcaagacctcgataagctggagcgctgtatctccgcttgggctgctctggcccctatgcagggagacccggacattaaccttgctgtcattaagctgcgcattgctaacgccattggtattgatacttctggtatcctactgacggacgagcagaagcaagcactgatgatgcaggatgcggcccaaacaggtatcgagaacgctgccgccgctggtggggctggtgttggtgctctagcgacctcaagtccagaagctatgcagggtgcagcagcacaggctggcctagacgccacctaataaccctcactaaagggagacctcatctttgaaatgagcgatgactaaaggttggagtcctttggtttccctttatctttaacaacttaggagatttaacaatggctgaatctaatgcagacgtttatgcgtccttcggtgtgaacaacgcggtaatgaccggaagcacacctactgaacacgaacagaatatgcttagtctcgatgttgctgcccgtgacggcgatgatgcaatcgtacttagcgaggaaccgagttcccataacgatgacccatatgcatccggtgtagacccgttcgctgatggtgaagacgatgagggccgcattcaggttcgtatcagtgaagatggtaatgaagccgagttcgacactggtagcgataacgctgaggtggagaccgaaggtgaagccgatgagtttgagccgctgggtgacactccagaagaactgagccaagttactgaacaattaggacagcacgaagaaggctttcaggcgatggtcgagcaggccgttgagcgtggactgagcgcagagtctgtgactcgcatctacgaagagtacgaagccgatggcatctctgagaaatcctacgcggaactcgaagctgctggctatagtcgtgcctttgtggactcctacatctccggtcaggaagcccttgtagaccagtacgtcaatcaggtagttgcctttgctggtggtaaggagcgctttagcgcaatccatacgcaccttgaagcaacaaacccggctgcggctgagtcccttgagactgccatgatgaaccgagacttggcgactgtcaaagcaattatcaatctggctggtgagagttacacgaagaaattcggtaagcctgccaaccgtagtgttaccaagcgtgctactccggttaaaccagtagctcgtcagaaagagggctttacgaatcaggctgagatgattaaagctatgagcgacccgcgctatcgtagcgattctgcctaccgccaaatggtagaacagaaggttatcgactccagtttctaattaaccctcactaaagggagagaccatagatgactacaatggttgaatcacctgagcacagaactttgtggtcactcccgtaggtgaaacattgagaaccaactcgattcaagtagtaaccaaacttttctttaaattaacataaggagattcaacatggctaacattcaaggcggacagcaaattggtactaatcagggtaagggtcagtccgcagcggacaaattggcgctgttcctgaaagtgttcggcggtgaagtcctgacggctttcgctcgcacctccgtgaccatgcctcgtcacatgctgcgctctattgcttctggtaagtccgcacagttccctgtgattggtcgcaccaaagctgcttacctgaaaccgggtgagaacctcgatgacaaacgtaaggatatcaaacacaccgagaaggtaatccacattgatggcctgctgactgcggacgttctgatttacgacattgaggacgcgatgaaccactacgacgttcgcgctgagtacaccgcacagttgggtgaatctctggcgatggcggctgacggtgccgtactggctgaactggctggtctggttaacctgcctgacgcctccaatgagaacatcgagggtctcggtaagcctaccgtactgactctggttaagccgacctctggcgacctgactgacccggttgagctgggtaaagcgattatcgctcagttgaccgttgctcgtgcggctctgaccaagaattacgttccggctgctgaccgtaccttctacaccactcctgataactactctgcgattctggctgccctgatgccgaacgctgcaaactatcaggcattgattgaccctgagcgcggtactatccgtaacgtgatgggcttcgaagtggttgaggttccgcacctgaccgctggtggcgctggtgatacccgtgaggatgccccggctgaccagaagcacgctttcccggcgacttccagcactaccgttaaggttgctctggataacgttgtgggcctgttccagcaccgctctgcggttggtacggtcaaactgaaagacttggctctggagcgcgctcgtcgtgcgaactatcaggctgaccagattatcgctaagtacgcgatgggtcacggcggtctgcgtccagaagctgctggcgctatcgttctcccaaaggtgtcggagtaattcccgaccccactggagttactcttagtcagaagactatgagcttagacgttggggcttctaaagccctgacttctacggtaactccggctgatgcagtacagacagtgacctttacgtcttccaatgcgaagattgccacggtcgatgcctctggtactgtaactgctgtgggcgctggctccgctgacatcactgcgactactgtgaatggcctgacggctgtctgcaaggtcactgtgaaagcagtatagcctcccgtagaaggctaaggtctttaccggggatttactttccttcattactttatgaaccccttgggtgccctctgagggtatctgaggggttttttgctttaaaccctcactaacaggaggtaacatcatgcgctcttatgagatgaacattgagaccgcaggagagctatcagccgtcaacgacattctggcttccatcggtgagccaccagtatcaacccttgagggtgatgcgaatgctgacgttgcgaatgctcgacgtgtactcaataagattaaccgacagattcaatcacgaggatggacattcaatattgaggaaggtgtgactcttctaccggatgcgttctctggcatgataccgtttagctctgactatctgtccgtaatggcaacaagcggtcagacccaatatatcaaccgtggtggctatctctatgaccgctctgcgaagaccgacagattcccttctggtgtgcaggtaaacctgattcgtctgagagagttcgatgagatgcctgagtgcttccgaaactatatcgtcaccaaggcttcccgccagtttaacaaccgcttcttcggtgcgccggaggtagacggagtgttgcaggaagaggaacaggaagcgtggcgtgcgtgcttcgagtacgaactagactacggcaactacaacatgctggatggtgacgcattcacctctggtctacttaaccgctaataacaaggaggctctatggctctcattagtcaatcaatcaagaacctcaagggtggtatcagccaacagccagatattctccggttcgctgaacaaggtagcgtacagattaacggttggtcttctgagtcagagggtctccagaagcgcccaccgatgattcaccttaagacccttggcgctgctgggtatgtgggtgcgcaaccttacgtgcatcttatcaaccgtgatgagttcgagcagtatttcgtggtgttcactggtgaagacattaaggtgttcgacctcgatggtaaggagtaccaagtacgtggagaccgctcatatgttcgtacagctaacccacgagaagaccttaggatggtaactgtggctgattatacctttgtgactaaccgcaaggtggttgtgcagagtaacgaccaatcggtcaaccttccgggctttaaagaccaaggcgatgcactgattaatgttcgtggcggacaatatgggcgtagattatcaatcgagttcaacggggttgagcgtgctgctgtgcaactaccagatggttcacaaccagcacacgttaacgaggtggatggtcaggctatcgctgagaagctggcggtgcagttgcggaataacctagggaacccaaacaatgagcaagacccaaataagtggcggttcaatgttggccccggattcatccatatccttgcgcctaataacgataacgtttggggactacagactaaggatggttacgcagaccagctaatcaaccctgtaacccattacactcagtcgttccagaagttgccgattaatgctccagatgggtacatcgtgaagattgttggtgatacctcaaagactgccgaccagtattacgttaggttcgacctcaaccgtaaggtatgggtagaaacaattggctggaacacaaggactcacctacattaccacacgatgccttgggcgctggtacgtgcttctgatgggaactttgacttcaagtaccttgagtggggtgctcgtactgtgggggacgatacaaccaacccatacccatcctttaccggacagacaatcaatgatattttcttcttccgtaaccgtttaggattccttagtggggagaacatcatcttgtctcgcacctcgaaatacttcaacttcttcccggcctccgtgtcaaactactccgacgatgacccaatcgacgttgctgttagccacaaccgggtgtcaaccttgaagtatgccgttccgttctccgaagagttgctcctgtggtctgaccaagcgcagttcgttctgacagcctctggtatcctttcgagtcgctccgtagagttgaaccttacgactcagttcgacgtacaagacagggcacgcccacatggtgtaggacgtaatgtatactttgcgtcacctcgcgcttccttcacatccattaaccgatactatgcggtacaggatgtaagctctgtgaagaacgcagaggacatgacggctcacgttccgaactacatacctaatggggtatttagtatctcaggcacaactgctgagaacttcgtggctatccttacgagcggtgcgccgaaccgagtgtatatctataagttcctctacattgacgaggaaatcaggcagcagtcatggtctcattgggactttggggacaacgttacggtgtttgcagcacatgtgataaactcaacaatgactgtattgatgggcaatgaacatgctgtgtggatgggacgcttgcacttcacgaagaactccatagacattccgggagagccttacagattatacatcgacgctaagaggaaatacaccatccctgccgggacgtataatgatgatacctaccagacgtccataagcctcgcaacgatttatgggatgaacttcaccaagggtatggtttcggtggtctttcctgatgggaagattgtagagatagacccgccaatcaacgggtggagtagcgacccaatattgagactcgatggaaaccaagagggccaagtggtttacattgggttcaacatcccgttcacttatacgttctcgaagttcctcattaagaagactgctgaggatggctcgacggctaccgaggatattggtcgcttacagcttcggcgtgcgtgggtaaactatgaggattctggcgcgttcaccatccgtgtgaacaacctgtcccgtgagttcatctacacaatggctggcgctcgcttgggttctgacaatctgcgtgttggcaggtcgaacattggcacagggcagtaccgcttcccggttgttggaaacgctcagacgaacatagtaaccatcgagtcagatgcgtcaacaccactgaacatcattgggtgcggctgggaggggaactaccttcgtcgttcttctggcatttaacttaaagtctccctgcggtgaattaaccctcactaaagggagacactaatagatacgaggggttaaagcattatgtacattacaaagtgtttacaaatccatgccgacaactttcagccgtccatagaggacattctggaagctgaggcactaggtgttgaaccaaaggtaattcctgatgagaacactgtggcaatgcttagcgataacgctgtgttggcaattggtggtaatcagggagaccgagtgtggttccttacctctaagtacgtcccactgtttaccttgaaggagcgcttagagtttcgtagacttatcattgaatatcgtgatatgatgctgagccagtatgagtccatttggaatttcgtttgggtaggcaataagtcacacattcgtttcctaaagaccataggtgcggtattccataatgagtttaccgctgatggtcaatttcaattattcactatcagtaggaggtaactatgtgctggatggcagcgattcctatcgccatgatgggtgcccaagctctgagtagccagaacagtgctgacaaggcacgagtggcacagacagaagctggacgccgacaggcaatggagatggtcaaagagacgaatatccagaatgccaacgcctcattggaacaacgagacgcccttgaagctgcatcctctgagttgactacacgtaacatgcagaaggtacaggctatgggaacaatccgtgcagctatcggcgagagtatgctagaaggcgaatcaatgaagcgcatcaagcgtatcgaagagggcaactacattcgggaggcaaatagtgtcaccgagaattaccgccgagactacgctagtatctttgcgcaacagttgggacgcactcagtccacagcaagtcaagtcgatgcaatgtacaagagcgaggccaaaggtaagtccggcctgatgcgtgtactagaccctctgtccattatgggtcaggaagctgcaagtcaatatgcggctggtggatttgacaagaaaggtggaaaccaagcagcacctatcagtgccgccaaaggaaccaagaccgggaggtaataatggctagtaaactaaatagtgttttaggcaacatggcgactcccggtatggaacgactccggggcgtcaaaggtatggactaccgggcagcaaccattcaggctgaacaaccaagagcgagtcttctggactccattggtcgattcgctaaggctggtgccgatatgtacatggcgaaagatgaacgtgataagcaacgagccgatgagcgctccaacgagattatccgtaagctgacccctgagcagcgccgacaggctatccagaatggtacactgctgtatcaggatgacccatacgcaatgcaagccttgaagttcaagaccgggcgtaacgctgcgttcctcgttgacgatgaggttcaacaggccatcaaagagggtcgcttccgtactcgtgaagagatggagcagtatcgtcactcacgcctacaggagcactcgaagtcgttcgctgagcagttcggcatcaatgagatggacgaggaatacctgaagggtttcaacgcgaatatcaccgagcgtaacattgctctgtatggggcacatgataccttcctgagtgaccaagcgcagaagggtgcaatcctgaactcgaaggttgaactcaatggtgtcctgtctgaccctgacctactgtctcgtcctgagtccggtgagttcttccagaactacatcgacaactccttggtgacagggatgaccgacaatcaggctcaacaggttatctcttcgtccctgaatgacgtgctacagcgtccgggtggtgccgccttcttgcagaacattgagaaccgcaaggtaactctaaatggcgctacgactacctatcgtgaactgatgggtgatgaacagtggcaggccatgatgattaaggcacagcacactcaattccagaacaacgcgaagttaacagagaagttccgactggatattaactcagcgcttaaccaagcggacactggtaaaggttgggagactcttcaaggtatcaaggccgaactcgataagattcagccgggtgaagagatgactcctgagcgtgagtggttgatttccgcacaggaacagatgcgcacccgcttcaagcaggaacaagctgagacagccaagctgatggacaagcaacagaagaccctgaataaatctttggtcatcgacaagcagttccagaagcgcctcaacggtgaatacgtctcgaccaactataaggacatgccgaccaacgagaacactggtgagtttacacatagtgatatggtcaactacgcgaaccagaagttagcggaaatcgaggcgatggacttaacgcctgaacagaaagacaaactgaaattggactacctacgggcagactccaaggagggtgctttccgtgcagcgtttggtgagatgattactgatgctggaaacgaatggcaggctgcggtgattaacggcaagatgcctgagagcacaccagcgatggacaaccttcgtcgcatccgcaacactgaccctgacctgattgcctctctgtatcctgacaaggccgagttgttcctgacgatggacatgttggataaccaaggcatcgacacgcaggttcttatcgacgctgataaggcccgcgcacagaagaccaaggagatgcagtttgaggatgaccgagcgtgggccgctatgatgaacgattcaacgaatcctcaaatcaagtacatgccttcgagtgtccaagggtatgccaggaagatttatgattccgtgaagtaccggacagggaaccctgacatggcaaccgaacaggtcgcaaagttcctctccgattcgacgaccacgttctccagtagcgatgttgagggtgatacctacggcgtcctaccgaagaacatcctgactgtttcggatgaccctaagtcgtgggagcaagggaagaacattctggacgaagccattaagggaatcacagcggcgaacccttggattaccaacaagcaactgtcggtgtaccagcaaggtgattcaatctacctgatggacacaaccggacaggttcgcattcggtatgaccaagagttactccagcgtgagtaccagcgtaccgcacagatgcaagctgaggcagcacgagagaaagccctcaaagaggccaacaagcgtgccccaataagccgtgcaacacaggcgcgtgaagaagcgcgtaaacgtgtccaagataaacggaagaagactccgaagtatatctatggacgtaaagaagactaacagtgataaggaggctccatgagctacgataagaacaaacctagcgagttcgatgggttatttcaaaaagcggcagacaatcatggggtctcctatgacctgcttcgtaaattagcattcaacgaatccagctttaatccaaaggccaaatccccaacaggcccgaagggtctcatgcagttcaccaaaggtacagccactgcgcttggcctcaaggttactgacgctgatgacgatgaccgttacaaccctgagttggctgtggatgcagccgctcgtcacctgagtgacctcattcggaagtacgatggggatgaactcaaagctgccttggcgtataatcagggcgaggggcgcaacggtgctccacagatacaggcttatgacaaaggcgattgggcttcaatctctgaggaaggtcgtgactacatgcgtaacctgatggatgtagccaacagtcctcgcaagggggacttggaggcgttcggcggtatcaccccaaaggctaagggcattccatcgggggatgcatttgctggaatcgggaagaagcagacggtaggcactgacctgccggagtccactggattcaaagtggagggtaaagagcagcaagcgcctaacgtgccttatgctaaggacttttgggaaaagactggaacaacactggacgagtttaattctcgttcaaccttcttcggaatcggagatgccacaagtgcagaacttcacaactccgtattgggtgtggcttttcgtgccgctcgtagtgatgacggttttgatttattcaaggacaccattacgccgactcgctggaacagccatacgtggactccagaagagttagagcgtatccgtaaggaggtgaagaacccatcgtacatcaatgtagtcactggaggctctcctgagaatctggacgccctcattaagatggcgaatgacaactacgagatggacgcgcggtctgccgatgcgggtgttggtgccaaacttactgctggtatcgtcggtgctggtgtagacccgctgagttacgtgccgctagtgggtgtagccgggaagggtctcaaggtggctaacaaggctttcattgtcggtactcaaagtgctggcctagctgttgcctctgagggtatccgcacatcaatagctggtggtgaagcacactacgctgatgctgctttaggtggtctcatgttcggtgccggtatgagtgcaatcagtgacgctatcgctgctggtattcgccgttcccgtgggactgaggtcgttaatgacttcgctcctatggcacaccgcttggaagcccgcgagaccgctctgaactctggtggcgaagacctgacccgtatgcctagcgataaccatgtgttcgaccgtgagcacgctggcgttgagtattcacctctggagaccgagccgggtgcagttgtgttgcctcaaggtcaaatcctgagcgacaccaacccactcaaccctcagactcttagcgagttcgaggcggtcaaccctgagcgtgccgctcgtggtatctctttgggtggtttcactgagattggcttgaagactctccgctctgagaacccgactgttcgctccattgcgagtgaccttgtgcgctctccgactggtatggagtccgggacttctggtaagttcggtgcgacagcttctgacattaaggagcgactccacgcgaacaaccagcgcacctacaatcagctttatgatgctgtgcgtactgcaatgaaagaccctgagttctccaccggtggttccaagatgagccgtaaggaaatccgacaggaaatctacaagcgtgcagccttagcgattgagcggcctgagcttcaagcaaatctgacaaagggtgagcggaatgtgatgaacatcctcaagcagcactttgacctcaaacgcgaaatcatggagaacccgtcaatcttcggcaacaccaaggcggtcagtatcttccccggctcacgccacaagggaacctacgtgccaaacgtgtacgaccgcgctataaagattgagatggttaaacgttacggtaatgatggcttgcagcgagcaatcgcggagtcatggttgacgtcttatcgtgctcgtccagaagtcaaggcgagggtcgatgagtacctgatggaacttaacggtctcaaatccgtgcaggaagttacgcctgagatggtgcagaagcacgcgatggataaggcgtatggtatttcacacaccgaccagttctctgcctcctctgtcattgaggataacattgagggtctggtgggtatcgagaacaacaacttcttggaagcccgtaacatgttcgacagtgacatggcggtgactctccctgatggtaacacgttctctgtgaacgacctgcgtacatatgacatggctgaaattctgcctgcatacgaccgacgagtagatggtgatgttgcaatcatgggtggttccggtaagactaccaaagacctgaaagatgaaatcatggcgctggataagcagtcagagggcaacggcacactgaaaggtgaagtggaagccctcaaggataccgtgaagattctaactggtcgtgctcgaaggaacccggaaggcgcttggggcacagccctacgctccgtcaatgaccttacgttcttcgctaagaacgcctacatgggtgcgcagaacatcactgaaatcgctggtatgctggctaaaggtaacgtctctgcgataactcatggcatccctatgattaacgattgggtcaaccgtggtaaaccgcttcgtgcctctgagattaaggagctacacgggatggtgttcggtaaggaactcgaccaactaatccgtccgggacgtgaagaccacgtgcgccgactccgggagtctacggacaccagcgctgcggttgccaatgtggtcggtacgattcgtttcggtactcaagagttggctgcacgctccccttggacaatgctcctaaacggaacatcaaactacattcttgatgctgcccgtcagggtgtgcttggggatgtggctggagcggcccttgctgggaaagcctctaagttcggtaaggcaaactaccttaagtctgcctctatcagccctgagcagtggaatggaatcaagcagttgttcagagactatgcgactcgtggggaagacggtaagttcaccattcgtgacaaacaggctttcgctaacgacccacgctcaatggacttgtggcgtctggctgacaaggtggctgatgagactatactgcgccctcacaaggtttcctcacaggacgccaaagcgttcggtgctggggtcaagatggtgatgcagtttaagaacttcgtcattaagtcactgaactcccggttcgtccgcagcttctatgaggccacgaagaacaaccgagcgttagaccaagcgctgacccacatcgtctctttgggtctagctggtggttactacgttgcgcaggcgcaccttaaggcctcaagtctacaggagcacaaacgtaaggagtaccttaagaacgcccttgaccctaagatgattgctcatgcgtcaatctctcgtagttcacacttaggctcaccattgagtatctacgacatgttcgctgggatggttggtagcgatacctataagtacacacgctctactgtactacctaaagagtccgagaagcgcgaccctaccaaggcagtgacaggtagacaggtggcttcaactatcgcaggtgcagttggtgagcaggttccgggtttaggttttgtgggttctgtgggcgcaacagcaattaacgccgcttccctgctatcttctccaaacaaggctaccgctctggagttccgtacaggactcttcaacacctctcgtgagttgattcctaatgacccgctatcgcagcaactcattatgaaaatctacgaggccaacggtatccgcataaaggagacgccgaagaaacaataaaccctcactaaagggagagaggtcacattctggcctcttctctcttaatgctaatttacaaaggaggtcacatggctacaactattaagaccgtgatgacttacccgctggatggctccactacggacttcaatattccgtttgagtatctggcgcgtaagttcgtcagagtgacccttatcggtgttgaccgaaaggaactcatcttgaatcaagactatcgttttgcgactaagaccacaatctccacaacgagagcgttggggccagcggacggttataacatgattgaaatccgtcgattcacctccgctaccgataggctggttgactttacggatggctcaatcctacgtgcgtatgacctgaacatctcgcaggtacagaccctccacgttgctgaggaagcgcgtgaccttaccgctgatacgattggcgttaacaacgatggtgacttggatgctcgtggtcgtcgtatcgtgaacgttgcggacgctaaagaccccggtgatgcaataactttaggtcaagtctctcgatggaatgagtctgcgctgaactctgcgaaggctgctgctgcatctcaacaggccgctgctgcatctcaacaggccgctaagtcctcagagaacaactcgaaggtatctgaggacaacgcaaagacctccgagaacaacgcgcatcaatgggcgcagcgtacagaggactctccggttcagggtagcgagttctctgcgtatcactactcacggaaggcctccaagagtgccgccgccgcaagtacgtctgaggggaatgcaaagacctctgagaccaacgctaagacctctgagaccaacgctaagacctctgagactaacgctgcatcgagtgctgctaaggcttctgaggaggctgctaagctgactaacatgaatgactttgctgcttctattgattcagtcaacggtaacaatgttgtcatgaagggtgacttaaccattaaaggaaacggtaaagtatcaatactgaaccacagtgggctataccaagataagaccgtgaatggcgtgaactatgccaacaggatttatatggatgatgctgggggcatgcactttgagaactaccgtgtgtctggtacttcagtcaccttacgtgctggttttgttattacagataccaacaggtttgactttacagggccaacgcgagttaagggtgatatcaccgcatatgtggatgcgccacctaatccagccatcggtcaatacctcaattctgtggcagttcgctcacagcttcggggccgtggtgctaagaatgatccacttggtgcgtactgtggtatgtatattcaggagcacgttggtacagaccacgcgataatccttaacctcaatggttatagcaaggatactaactggcagctattctccaatggtaaaatatctacaccacttggtgatgtgatgacctcaggttctgatgttagaatcaaggatgatatcactaaacctcttgatggtgctggtgagcgtattgacgcaattggcatagtggaatacacagagattaccaccggggaacgtaaacgtgggtggctggcccaacagcttgacacgattgacccgctgtacacatacctcacgaccaccgcagaaggtagtcttttgaataccaacgacagggcgttgcttgctgacgtaatcactgagattcaggcactgcgtcaacgcgttaaagaactcgaaggacaatcaacaaagccagaggacggcacaacataaggagaacaagaatgttatcttttgacttcaataacgaggtcgttaaggctgcgcctattgttggcacaggggtcgctgatggggcggcccgactcttttggggactatcgttaaacgagtggttctacgttgcagctatcgcctacacagtggttcagattggtgccaaggtagtcgataagatgattgactggaaacgtgcaaataaggagtaacccatgagcgacaagactttaatcaagctgctggagatgctggacacggagatggcacagcgtatgcttgctgacctccagagcgaggagcgccgaacgccgcagctttacaacgcaatcggcaaactgttagaccgccataagttccaaatcagtaagctgaccccggatgagaacatccttggtggtctcgcggctggtctggaagactacaacaaagtggtcggccctaatggtctgactgacgatgagactatcacgctacagtaagtgacatactcaaggttctccacgtggggagcctttatggatgttatttggtgcatctacgtgaagtctaaaattgatgggaggtgttatgctaaaacttttacgcagcgcactcccttgggtactcgccgggacactctttatgggtggctggcacttagggtcaacccatgagagagcaaactggaaggaggtaatccaaaatgaatacattgcgaaaacaaaagcaaccgcagcaactcaggcagaggtcagtcgggtatcccgtgagtaccaagaagagattgcagccattgagggcagcactgataggatgcttaatgacctgcgtagtaataataagcggctgtcagtccgcatcaagacccttaccggactaccagaagataacggtagatgcgagtttaatggtcgagccgaactacacgagtcagatgctaagcgtattatcggaataacccaagctgctgatgctcacgtaagagcgctccagcgtactattaaggagatgcagaatgagcgacacccaagcaaaccgtaatgcgctaatcattgcgcagcttaagggtgacttcgtggccttcctgttcgtattgtggaaggctttggctctcccgccgccgactaagtgtcagatagatatggcccggtgtctggctaacggagacaacaagaagtttatcctacaggctttccgtggtattggtaagtcattcatcacctgtgcgttcgttgtgtggacgttatggcgtgaccctcagttgaagatactaattgtctctgcatccaaagaacgtgcggacgctaactccatcttcatcaagaacatcattgacctgctgcccttcttggctgagctaaagcctcgccccggtcagcgtgactctgtgattagtttcgatgttggccctgccaagcctgaccactctccgtctgtgaagtcggtgggtatcactggtcagttgactggtagccgtgctgatatcatcatagcggatgacgttgagattccgtctaactccgcaactcaaggtgcccgtgagaagctgtggactctggtgcaggaatttgctgcgcttctgaaaccgctgccgacttctcgcgttatctaccttggcacgcctcaaaccgaaatgaccttgtacaaggaactcgaagataaccgtgggtacaccacaatcatctggcctgcgctctatccgcgtagccgtgaggaagacttgtactatggcgaccgtctggccccgatgctccgcgaagagttcaacgatgggttcgagatgctccaaggtcaaccgactgaccccgtgcgcttcgatatggaagacctccgggagcgtgagttggaatatggtaaggctggcttcactttgcagttcatgctcaacccgaacctgagtgatgccgagaagtaccccttacgcctccgtgacgctatcgtgtgcggtctggacttcgagaaagccccaatgcattaccagtggcttccgaaccgtcagaatcgcaatgaagagcttcctaacgtgggccttaagggtgatgatattcatagctatcattcgtgcagccagaacactggacagtaccagcaacgcatcctcgtgattgacccaagtggtcgcggtaaggatgagacaggttacgcagtgttgttcaccctgaatggctacatctatctgatggaagctggcgggttccgcgatggttattccgataagacccttgagtccctcgctaagaaagcgaagcagtggaaggttcagacagtggtcttcgagagtaacttcggggatggtatgtttggtaaggtattcagccctgtgctcctgaaacaccatgcagcgcaacttgaagagattcgtgctcgtggtatgaaggaactacgcatttgtgatacgctggagcctgtactctctacgcaccgccttgtgattcgtgacgaggtgattcgtgaggactaccagactgcccgtgacgctgatggcaagcatgatgttcgctattcgctgttctaccagttgacccgtatggcccgtgagaagggcgctgtggcccatgacgaccgacttgatgcattagcattgggtgtggagttcttacgctctacgatggaactggacgccgtgaaggtggaagctgaggtgcttgaggcgttcttagaggaacacatggagcacccaatccattcggctggtcatgtagttacctctatggttgacggtatggaactctattgggaggatgacgatgtgaatagcaacaggttcattgactggtagttatgcatattgagtgcataaggaatcattgagaccacggatggtcactttaagaaattccttaagaatcaatgagtttgaattaaccctcactaaagggagagaggggacttaaagctactatataggttagtcattcaggttatgcaatgaccctttatgcactttaagtctcctctatgattggtgatattatcattgtataatcaccctaccttagagcaactgaaaggaggtggctcaatgttacgcttgctgattgccctgctgcgtcatagagtcacttggcgatttcttctggtacttactgctgcccttgggtacgcaggtcttaatgaccacctcggtcaactggaagtggccttttgctctatactctcttgtggggattaaattattgttgatgaacgacaagcggctctgagggattcgtaggtatagtttcactacaccaactcatccctgtagagtcaaccctaaaggttatacctaaagatgccctgtagttcgtaatggtcttacagggtcttctggtgtctcctagctatcccttcgggatgcgcctatggtctcacctatggtgtggccttacctaaagtgggttcctaaagagaccctttaagaatttactacaaaaatctgaatgggtatctcacagttcaagaacccaaagtaccccccatagccctcttaaagccacctaaagccagccctacccctagggtttaaccttcggttaaccttgagtgtagcgataactcactacggtatctactcgagtggcctataggatagcctaaagtgttgcctaaagtcaatatctaaagtggtggatggcttaatgagggcttaaagagtgtcctagtgtaccagttcaatagtacatctctatgtgtccctatctgttagcctcctaaagtaaaccctaaagccatcacctaaagccatcacctaaagagcgccgctatcttaaagacaaccagaccgatagacccactgttagcctgtagtgatgccttgtagttgcctatggtgtctatcgtcaattcaattaccctcactaaagggaataagggaataagggatacttaaaggggaattagggatttaataaaagattaaaattaatggttgactttaagtaacccttaaggctattattcatctcgtcaacgggacaacggccttaaagccactccctgagataccggagtcaaccggataagtagacagcctgataagtcatacgaaaaacaggcattgacaacatgaagtaaacgcagtaagatacacagcgtcaaccggacacaaggtgtcttctaggtgacttaagcgcaccacggcacataaagtgaaacaaaacggttgacaacatgaagtaaacacggtacgatgtaccacgaaatgacggaacagtgaggcgggacactgaaagccgctagggtctaacgaaaccagaccgacacgctctttaacaatctggataatagctcttgagtgtaccgatgtataagcgaataactcaaggtcgcactaaaagcgtggcctttatgatattcacttaacatgaactaacatgaggtaacaccaaatgattttcactaaagagcctgctaacgtcttctatgtactggtgtcagctttccgttccaacctcgacgatgaggtgaacatgagtcgccaccgccacatggtaagcactttacgtgccgcaccgggtctttatggctccgttgagtcaaccgatttgaccgggtgctatcgtgaggcaatcgcaagcgcaccgactgaggaaaaaacggttcgtgtacgctgcaaggacaaggcgcaggcactcaatgttgcacgcttagcttgtaatgagtgggagcaagattgcgtactggtatacaaatcacagactcacacggctggtctggtgtacgctaaaggtatcgacggttacaaggctgaacgtctgccgggtagcttccaagaagtgcctaaaggcgcaccactgcaaggctgctttacgattgacgagttcggtcgccgctggcaagtacgataagtgttaaactcaaggtcgcacgctgagtgtggcctttatgattaccactaaataaccctgagaggatatgactatgaaacaatacgccatccttattcccggctggtgctactcaatgacctgctacgggtacaacgaaagggacgctcgtgcccgattcagggatcaacaaggcttcggcaagcgtttacctaatggtacggctgtatgggaggttatgtaatgagtaagttactggcaacatccaaaatagcaggccagtgcaccgtaacactgcgtgagtattaccacgggtcaatgggaagcacctacgttgtgcggtatggtaaacaggtcacacattgggtaaacccgattttagcacaagaggattatcaagcctgtgtggtacaccaagcaacatgtgcgggctggaatgattgataacgcgctttgcaatcactggacaacaggcttcaagtctatcaggtggtaaactcaaggtcgctccatgcgagtggcctttatgattaacattacgatagaggatgagagtatgggatacgaagacacgaagaacctgataattctctgtatagcaatacccgctgcaatcaactttgtgtacgaggtatggattaagaaatgattatcgcactaatcgcactggtctatctatgcatcgcaatgtactttatgcgagactttaagcgcggtctggcaatacacaaggcaacgctgagttactttaagtggggattcatcccacggtttacggttcgtgaacgtaacggacgctttaaagccaacaaggtaggagtattctacattgctacgcactaactcaaagcacgtaaagattgcactgtatgcgatggcttatggtgcatcgaaacgcaaggtcaaacgcatcttaacgagacaccgcaagatgaccgcacgacaggctgcaagcgctgtcaaatgggctgaatttactctttactcttcttacagataacaggacactgaacgatgactttcaccgaagcacaagccgcactcgaagctatccgcaacctaccgattgagcgcctgaacgaacgccagccaatgctggtggctcttgcggctgctatcgtgaacgatgagactcaggacggcgaactgacgcaggcagcaggaaacacgtcgctcgaagatatggactactggcagacactggctgagcgtatgcgtgatgttggatttgtacgcttgggtaacggtcactttagcgcagcatatgagcacgcactgttaccgggcaaggtcatcaaggtaggctttaagaaagaggactcaggcgcagcctatgcagccttctgccgtatgaatcagggtcgggagggtatccctacggtgtacgacattcagcgtcatgcaggctgctacacggtggtcttggactatctgacaccgcttaacgattggtgctacggtgaaagcgataagattcgccaccacttccgcgctgcaagggaaatcattgaggaggattgcttcaataccgccgaagagtacccgataagtgacgggttcattgagacctgcaaggatatccgcaagttcttcctaggcattgcatcgttcgattgtcacagcggtaacatgatgaaagaccaaatgggccgcttgattatcacagacccggtatcgttcagcgcagacaacaagttaaagccgggtgagtttcactgtgacccggatgaactaatcgctgagattgaggcgctgagggcgcaggaagcgattgaccgctgtaaggcacgcaaggcacgccgtgaccctaaaggaacctttcaggtagcacgtaaagcccgtgcaaaatggcgcagaaaggcctctaagcgtgctaaacgtgacgctaaggtactcgctaagatgcgcatggacgccaatcagaatcgcagggatgagcctagggcgcgtatggtgtggggcgataagcactggcgcaacgcttgggtgcaccacaataacctaaactttgcagaactggagcgcctcgctgctgcggcaatgatgatgcacgacgaggtgcgcattcagtggggcaaaccgttacacatagacgcgtaccttgacaggagactgcaaggctgatagagtcttttcttacaggtcatcacgaggtggcctgaataggaacgatttattcacaacgaggtaagcaatgaacatcatcgaaactatcgaaaagaatgacttctccgaaatcgaactggctgctatcccgttcaacacactggcagaccactacggtagcgcactggctcgtgaacaactggctttagagcatgagtcttatgagctaggcgagcgccgcttcctcaagatgcttgagcgtcaagcgaaagctggtgagattgcagacaacgcagccgctaagccattactcgctacgcttctccctaagttaaccgcacgtatcgtagagtggctcgaagagtacgcatcgaagaaaggccgcaagcccgtagcctatgcaccgctccagttactcaagccggaagcctccgcgtttatcaccctgaaagttatccttgcgtcactgaccagcacgaacatgacaaccattcaggccgctgctggtatgctagggaaggccattgaggatgaggcacgtttcggtcgcatccgtgacctcgaagcgaagcacttcaagaagcacgttgaggaacagcttaacaagcgccacgggcaagtctacaagaaagcctttatgcaggtggtcgaggccgatatgattggtcgcggtctgcttggtggtgaggcgtggtctagctgggataaagaaaccacgatgcacgtagggattcgcctgattgaaatgctgattgaatccacgggtctggtggaattacagcgccacaacgcaggtaacgcaggctctgaccatgaggcactacaactggcccaagagtacgtggacgtattagcgaagcgtgcaggcgctctggcgggtatctctccgatgttccagccatgtgtcgtaccgccgaaaccttgggtagcaatcaccgggggcggctattgggctaacggtcgcagacctttggcactcgttcgcactcactctaagaagggcttgatgcgctacgaagacgtttacatgccagaagtctacaaggctgtgaacatcgcgcaaaacaccgcatggaaaatcaacaagaaagttcttacggttgtcaatgagattgttaactggaagaattgcccggtcgcagacattccatcgctggagcgccaagagttaccgcctaagccggacgacattgacaccaacgaggcagcactcaaggagtggaagaaagccgccgctggtatctaccgcttggacaaggcacgagtgtctcgccgtatcagcttagagttcatgctggagcaggccaacaagttcgcaagcaagaaagcaatatggttcccttacaacatggactggcgcggtcgtgtgtacgctgtgccgatgttcaacccacaaggcaacgacatgacgaaaggtctgttgaccctcgctaaaggcaagccaatcggtgaggaaggtttctactggctgaaaatccacggtgcgaactgtgcgggtgtcgataaggttcctttccctgagcgcatcgcgttcattgagaagcacgtagacgacattctggcttgcgctaaagacccaatcaataacacttggtgggccgagcaggattcacctttctgtttcctcgcgttctgcttcgagtatgcaggcgttgcgcaccacggtctgagctacaactgctctctgccgctggcgttcgacgggtcttgctctggtatccagcacttctccgcgatgctccgcgatgaggtaggtggtcgtgcggttaacctgctgccaagcgaaaccgtgcaggacatttacggcatcgttgcacagaaagtaaacgagattctcaaacaggatgcaatcaacggcacacctaacgagatgattaccgttaccgacaaggacaccggggaaatctcagagaagctcaagctgggaacctcaacgctggcgcaacagtggctggcatatggtgtaacccgtagcgtaactaaacgttcggtcatgacgctggcttacggctccaaggagttcggctttcgtcaacaggtactggacgacaccattcagcctgcgattgacagcggtaagggcttgatgttcacccaacctaaccaagcggctggttatatggctaagctgatttgggacgcggtgagcgtgaccgtagtcgcagcggttgaggcgatgaactggctcaagtctgccgctaagctgctggctgctgaggtcaaggacaagaagaccaaggagattctgcgccaccgttgcgcggttcactggactacgccggacggcttcccggtctggcaggaataccgcaagccactccagaagcgtcttgatatgattttcttagggcaattccgtctgcaaccgacgattaataccctcaaggattcaggcattgacgcacacaagcaggagtccggcatcgcacctaactttgttcactcacaggatggtagtcacctccgcatgacagtcgtttatgctcacgagaagtatggtattgagtcctttgcgctcatccatgacagctttggtactattccggcagacgctggtaagctctttaaggctgtgcgtgaaacgatggttatcacctatgagaacaacgatgtgctggcagacttctactctcagtttgcagaccagctacacgagacccaactggacaagatgccaccgcttccgaagaaaggaaacctgaacctgcaagacattctcaagtctgactttgcctttgcataacaagcacttagcattaaccctcactaacgggagactacttaaggtctccctctttaagacactttaggtactaagagattaaatttatgattaacattaagactttctttaagaacatctttaagttaaaccgcttgacttccgttaagttctacgcttggatgcccggtagtgatgacctccgcaagaccgaatttaagttaggcttagggccgtgcggtaaggtggtcacgaagttggaatgttactcaacgtcctccgggatggtcatcttccagaccactgaggacaacgaaacgaaatcattctactacccgaagggttcaacgtgtggtcgtatcgaacggacatacagttaaccctcactaacgggagagttaaacttaaggtcatcaccggcggtggcctttgtgattaactttcaatacacatcaacatgaggtaagatactatgcgtaccaactttgagaaatttaccaagcgcgattcagtggtcaacgagcatggcgaacagtggcaagagcgccgtgaccgcatgaagaaacgccacaagcaacagcgcggtaactcacagaaacgggagtggaactaatgatgggacgtatctatagcggcaacctgaacgattacaaagatgcggtagcgcgtctacaggaagaccatgacgtgaccgtgaaggtggagtcattcagctatgaaaacccagcgaagatgtgcaggtcatccggtgaggttctccgcgtgttcacacgctcagggcatccggtggcatccagaaccttcgagcatagcgacagcgatgtacaaatcaacgcgcagactgcatggctccgtaaggttcacagcgatttgaaacactggaagtaataaccctcactaaagggagaacgaaaggaggaaacattatgagaatttcatttgacttaatgagtccttcctttctctcatgggatacgggtcgtcacactggcggctctattcgcaacggctatagaagggttcgttatgaaggtaagtggttaaaccatcacatactcatttgggaacacttcaacggtgcagtcccggagggaatggaagtagaccacattgaccgtaacaaacttaacaacgcgcctagtaaccttagacttgtgacccgctctgagaacaacagaaatcggtcagtacaccggaacaacaagtcaggaatcaaaggtgtctactggcacaaacaccgccaagtttggtacggtcagtgtcgaagaggcaacaaaacatttatcaccgctggttgctccacgaaggaacaggcggcagaacttttagagaaactcaaagaggaaattaattatgatgattttcaaaaccgtcccgtataaggctgtgtcattcgtagagtctgccgttaagaaagcgctggagacctccggctacctgattgctgacattaagtacgatggtgtgcgcggtaacattgtggttgacaacgtggctgaggccgcatggctgtctcgcgtatccaagttcatcccggcgctggaacacctgaacggtttcgataagcgctggcagcaactactgaacgatgaccgctgcatcttcccggatggcttcatgctggatggcgaactgatggtcaaaggtgtagacttcaacaccgggtctggcctgctgcgtaccaagtggctcaagaagaacaacttcatgtttgaccgtggtggtgttgagccgctgaaaggttccaaagtagcctttgagttagaccccaagctactcagtgttcgcctgtatgcggtcatgccgattcacattgcggagtctggcgaggactacgatgtacagaacctgctgatgccgtatcatgtggaagccatgcgctctcttctggttgaatacttcccggaaatcgagtggcttatcgctgagacctacgaggtctacgatatggattcgctgactgaactgtacgaagagaagcgtgccgaaggtcacgagggtctcattgtgaaagacccgcagggcatctataagcgaggcaagaagtctggctggtggaagctcaagcctgagtgtgaagctgatggtatcattcagggtgtcaattggggaaccgaaggtttagccaacgagggcaaagtgattggctttagtgtgcttcttgagactggtcgtttagtagacgccaacaacatctctcgcgcactgatggacgagttcacagccaacgttaaggcacacggtgaagacttctacaatgggtgggcctgtcaggtcaactacatggaagagactccagatggctccctgcgtcaccctagcttcgagaagttccgaggcactgaggacaaccctcaagagaaaatgtaaccaactcactggctcaccttaacgggtgggcctttcttcgttcagcggtattaaccctcactaacaggagacacacacaccatgtggcttatcctattcgctatcgtcgcaacgctgggattaatggctgccgacgacaacatttggcctgattgttaaggagataacatcatgcgtttacatttcaacaaatccaacggtatcttttcggttcgccgtaaagaccgctcgaccgtattggcctctgagcgcaacgccaagctgccgctgattggttcggtcgccacgctatcaccttgtgttcacctgctgattactcgtggtgagttcgtcaaggcgatgaacaaagagcgtcctcatctggaagccgtggtcacttactggcctcgcattcgtctgttcgttaagtggattaaggaggtgctgtaatgctgcaacatcattggaacaaaccagacttagaggctcgcttcccggttaactctgtggtgcgatactccggcggtggcctcaagcgcatcttagggatgagcggagtggtaactggtcactcgcacacaggtcgcgtcaaggttcgcttcggtactcagcacgctgaggttctcccgaacaacctgattccgctaccgaaagctggcgttaagactccgaacgtggaagcaccgaagacagaagtcaagtctgatgttacccatccgaaccactacatgttgttcgacaacgtggaagccattgaggttatcgcccggtcaatgaccgtcgaggcgttccgtgggtactgcttagggaacatccttaagtatcgcctacgtgctggcaagaagtccgaactggcaactatggagaaagacctcaagaaagctgcattctatcaggaactctttgacaaacaccgggggctgtgttatgacgcttcgtgaatgttgcgattggtgtgccgctaagtggaaccaagctatcgaggatggtgacaaggcgtctgctgacgcttaccaacaactgtacgcgctgtgggagcggcgctttaaggaggccaataaatgagccaatgtaacaacgggtgcaagtatgcgaaggacgtagggatggagaaccactcctgcgcaaatcgctgcatgtactcagaacagaaataccttctgacaatggaaggtaacaccgagtcctttgagattccggtattcgcccggtctcttgaagaggcaacgctacaggctgaacattacgaggacgcagggttcgtagttactcgaatccgtccagaagtgaaagcctaattaccctcactaaagggaacaacccaaactatcaaccaaaggagaaatactatggctggtttcaagaagaaaatctacacatctggtcttggcactgctgagccttatgcttacctgagtaagccggattatggcaacgaagagcgtggcttcggcaaccctcgcggtatctataaggtagacctgactctttccaataaagacccgcgctgtcaggcgatggtcgatgaaatcgtgaagactcacgaagaggcttatgctgctgccgtggaagagttcgaagctaacccgccgcaggtacagcgtggtaagaaaccactgaaaccttacgagggcgacatgccgttcttcgataacggtgacggtacgactaccttcaagttcaaatgctatgcgtctttccaagataagaagaccaaagagaccaaacacatcaatctggtcgtggtcgatagcaagggcaagaagattcaggacgttccgattatcggtggaggctccaagctgaaagtgaaatactctctggtgccttacaagtggaacacagctgtgggtgcaagcgttaagctgcaactggagtccgtgatgctggtcgaactggctaccttcggtggtggcggtgaagatgagtgggccgatgaagtcgaagatggtggttacactgcgagtgaatcccgtcagtcccgcgatgagcaggagtggcaggaagacgagcacgaagaaaccccggatgatgacgaggacttctaatggctggcgcatacgctgcgcgaggtgtacgcaaggtcggagcattccgttccggcctagaagataaagtctcaaagcagcttgagagtaagggaattaagttcgactatgaactttggcgtatcccttacgtcatccctgcgagtgaccacttatacactccagacttcctgctacctaacggtatcttcattgagaccaaagggctgtgggattccgatgaccgcaagaaacaccttttgattcgtgagcaacaccccgaactggacatacgcttggtcttctcaagcagccgctcaaagctctacaagggtagcccaacaagctacggtgagtggtgcgagaagcatggcattctgtttgctgacaagctgataccggtggcgtggctcaaagaacccaagaaggaggttccgttcgataaatttcagactaagaaaggagtaaagaaaaatggctaaagttcaattcaaaccacgagcaaccacggaggcaatctttgtgcattgctcagcaaccaagccaagccagaacattggcgttcgtgagattcgtcagtggcacaaagagcagggatggttagacgtaggttatcacttcatcatcaagcgtgatggtactgtggaagcaggccgcgatgaactggctgtaggttcccacgttaaaggttacaaccacaactccgtaggcgtatgcctcgtgggtgggattgatgataaaggcaagttcgacgccaactttacacctgcgcaaatgcaagcgctgcgtagtctgctggtcacgctgctggcgaagtatgagggttcagtccttcgtgctcaccatgacgttgcacccaaagcctgcccgtccttcgacttgaagcgctggtgggagaagaacgaactggttacatctgaccgagggtgataccatgaggatgatttgtattcgctgtgataagccgttgaagagtcgcgtaccgtcacgtcagtgtcagtgcaaagacccaatcaaggctgaggaacacaccgaggaataattaacactcactaaagggatagtcgaaaggccgtccctttgttctcgaaggaggctaaaatatgaacaaaccatacaagcagttctatcaggctccgcgaagacacattcaagtgtgggtagcagctaatgggcctatcccggaagggtattacatagaccacattgacggcaatcctcttaacgatgacctgtccaatctccgtctcgctcttccgaaggagaactcccggaacgccaaaacatccaaagcaaacaagtccggcctcaagggtctctcatggagggacgataggcagtcgtggcgtggtgctgtgatggcagacggtaagcaatacacaaccaccagcaaggacttacttgaggtagtagcgtggatttacagaactaggagagaacttcatggacaattcgctagattcagatagcatatttctctatcacatcccatgcgaaaactgtgggagcagtgatgcaaactcgctgttctccgatggtcatacttattgttacgcctgcgagaactggacgcccggtgacggtgagagacctgagcgggaacgtagacaatcaaatgggagaaagcctatgagctatgacgtatggaatttcggcgacagcaacggtcgatactctgacctgactgcccgtggcatctcgaaggagacatgccaaaaggctggctactggctggcgaaagtggacaaccgaatgtatcaggttgcggattaccgtgaccagaatggttccatcgtgtcacagaaggtgcgcgataaggacaagaactttaagaccactggaagtcacaagagcgatgcgttattcttgaagcacctctggtctggcggtaagaaaattgtggtcactgagggcgaaattgatgcgctcactgtgatggaactccaagactgtaagtacccggtcgtatcattgggtcacggtgcctctgctgctaagaagacatgcgccgctaactatgaatactttgaccagttcgagcagattatcttgatgttcgacatggatgacgcaggccgtaaggcagtcgaagaggccgcacaggttctcccggctggtaaggttcgtgttgccgtgttaccgtgtaaggacgccaacgagtgtcacatcatgggtgaagacaaagcaatcttggagcagatctggaacgcgaacccttgggtgcctgatggtgttgtctctgcgttgtcactcaaagaccgcgttaaggaagctatgacctccgaggacgctgtgggtctgctgttcgatggctgtcaaggcctgaacgatagaaccttgggtgcccgtggaggcgaagtcattatggtcacttccggttccggtatgggtaagtcaacgttcgttcgtcaacaggcgctggcttggggcaagcgaatgggtaaacgtgttggcctagcgatgctggaggaatccgttgaggataccattcaggatatgatgggtctgaacaataaggttcgtctgcgtcagtctgatgaagtcaagaaggctatagcagaggacggacgtttcgatgaatggtatgacgaactatttggagacgatacgttccacctttatgactcctttgcggaggccgaagctgacagactgttagcgaagctggcctacatgcgaacaggcttagggtgtgatgttatagtgctcgaccacatctcaatcgtcgtgtctgcctctgaggaatcggatgagcgtaagatgattgaccgcctcatgactaagctaaaagggttcgctaagtcaactggtgttgtgctcgtagtgatttgtcacttgaagaacccggagaagggaaaaccacatgaagaaggacgcgctgtttctattactgacctacgtggtagcggtgcgctgcgtcagttatctgatactatcatcgccttggagcgtaaccagcaaggtgatatgcctaacttggtgttggttcgcctgcttaagtgtcgtttcactggcgacactggaattgctggatacatggaatacaacagagaaaccgggtggcttgaaccgtctagctacactggcgaagaaggagaaggagatactggctggactgaacaagacggacaatcagacttctaaataccagtgccactgcggtcatccagactgtgatggcggaatgtataattgattaaccctcactaacgggaacaacctcaaaccataggagacacaccatgtttaaattcattaacgctttaggtaagctggtagttaaactgtacttcgtcgaagccaagaagctggacaagaaggccaaagctgattcacagcgagccattgagttggcgaaacagtcccgtgagaaatccgatgcggctgttagtggcatccacaagtcggcagcgattgcagccaaagcacaatccatgagcaaattctttgagtaaggagcacaccatgagcaagtcaatcactcacgcaaacaccatccgtctgccggacaccgctgaccagttcgctcgtcgagtacatattaatgtgcgcggtgagaaggtaacgatggtctaccgctggaaagaccacaagtctccgaaagcacacactcaacgcatgaccttgactgacaagcaggtaggccgcctgatgggtgccctgactatggctgctgacaaggtggtcggtgataaccgtgagcgtctggtagagttcggcgctggtatgcaagagattatcgagaagtgataaactcaaggtcgcccaagggtggcctttatgattatcatttatcctgaaatgaaaggagggcattatgctcgtaagtgacattgaggccaacaacctcttagagaaagtcaccaagtttcactgtggcgttatctatgactaccgcgatggtgagtatcatagttatcgtccgggcgacttcggggcgtatctggatgcgctggaagccgaggtgaagcgaggtgggcttattgttttccataacggtcacaagtatgacgttccggctttagagaaactagcaaagctgcaactcaatcgtgacttcaagttaccccgtgagaattgtattgacacattggtactctcgcgtttacttcatgcgaaccttaaagacacagacatggggcttcttcgttccgggaaactacccggtcgtcgcttcgggtctcacgccctggaggcatggggttatcgcttgggcgagatgaaaggtgaatataaggacgacttcaaggctatgctagaagagcagggcgaagaatatgttgatggtgctgagtgggtttcgttcaacgagccgatgatggcttataacgttcaagacgttgtggtcactgtcaagctcttagagaaattccttacagacctccactacttccctgcgggtatggacttcacgaagtacgatgcggatttattctggcgagaagctggcgagtctgtggatattgaacatcgtgcagcgtggctgttagcgaagcaggagcgtaacggcttcccgttcaacacacaggccattgaggaactttatgtagaactggcagcgaaacgcgccgaacttctgcgaaagttaaccgaaacgtttggctcgtggtatcaaccgaaaggtggtaaggaactcttcaagcacccacggacaggcaagccgctgccgagttatcctcgcgtggtctatccgaaacagggtggcgtgtacaagaagcctcgtaataaggcacagcgcgaaggtcttgaaccttgcgacttggacacgagggattacatggaaggtgctccatatactccggtcgagttcgttacgttcaagccaagtagccgtgaccacattcagaagaaactacaggaggccggatgggttcctgagaagttcaccgagaagggtgcgcctgtggtggacgatgaggtcttggagcatgtacgagtggatgaccctgagaagcaggcgtgcattgacttgattaaagagtacctgatgattcagaagcgaatcggtcaggcggcagaaggtgacaaggcgtggttacgttatgttcaagatgatggtaagattcacggagccgttaaccctaacggtgcagttactggtcgtgctactcatagtttcccaaaccttgcacagatacccggtgttcgttctccttacggggagcagtgtcgtagtgcttttggtgctgaacatcatttggatgggattactggcaagccgtgggtgcaagcggggatagacgccagtggcttagagttgcgctgtctggcacacttcatggctcgcttcgacaacggagagtatgcgaatgagattctcaacggtgacattcacaccaagaaccagaacgctgcggaactcccgacacgcgacaacgccaagactttcatttacgggttcctttacggagcaggagatgagaagattggtcagattgttggggcagggaaggagcgcgggaaggaactcaagaagaaattcttagagaacaccccggcgattgcagcattgcgagaagctatccaacagtctctcgttaagtcttccgcttggattggcggtgagcagaaagtccagtggaaacgccgttggattaaaggtctggatggtcgcaaggttcacgtcaggtctccacatgcagcgctcaacacattgttgcagtctgctggtgctctgatttgtaagctgtggattattaagaccgaagagatgctcattgagaaaggcttgaagcatggctgggatggtgactttgcgtacatggcttgggttcacgatgagattcaggtggcctgccgtaccgagcacatcgctcagattgttattgacaccgcgcaggaagctatgcgttgggtcggagagcattgggctttccgttgtcgtttagataccgaaggtaagatggggccaaattgggccgtctgccactaacagtaggagaaacattatggcaatgaccaaacactttaaagtaaccttcgacgttactgctgtgattgacagtgaatccgagaagaatctgaacgagttgctggtagacctagctaagaaggccgggtctggcgagaagctgaatccgttcaaacaagaactgcttattcaaggtctgacacacgggccggaaggtgcggctgcgttctgcatcaagcaaggtctccgtgagtttatccgcgatggtcacagtgagttaagctctaccgagcagaagcggatgaaattctcacctgcaactgtgcgggaggtgttcaaatgagtgaatacctgaaagtgcttgcagctatcaagggttgccctaagtcctttcagtcgaactatgtgcgaaacaatgcggctctcgtagctgaggccgcgtctcgtggacacattagctgtttgactgttggtggtcgtaatggtggagcgtgggaggtcacatccgctggtgtgcgcttcctgaaacgaatgggaggttgtgtatgattatgccaaagagtgacaccgtaacgatgactcgtgatgcgtggaatgatgttagcgcgtacattgataagctggagaaagacctagagttcctgaatgctcttaaggcgtgtggtgtggataattgggacggatactctgatgcaatcgagatggtttacggggaggaagacctatgagtttgattaccctcaaagacttcgctgagatgcgtgaaggtaaaccgatggagaagggcgtgctggtcatggatggtgactggctggtgtatcagtcgatggctgctgccgaagttgagacggattggggcgatgacatttggactctggagtgtgaccacgctaaggcgcggagcattctggattctgcaatcgaatcgtaccgaacccgtaagaaagcatggcgtgacgctacggttgtgctggcgtttaccgacgatgtgaactggcgcaaggaacttgtagacccgacttacaaggagaaccgcaaggcgacccgtaaacctgtgggctaccgtgacttccttcaagctctgtgggagcgcgatgagttcattcacatcaaagaggacatgcttgaaggtgatgacgttatgggcatcattgggtctggtcacgaggtcttcggcttcaagaaggctgtgttggtctcctgtgataaggacttcaagactatcccggacgttgacttcctgtggtgtaccactggtaacatcttgacgcagaccaaagagaccgctgattggtggcatctcttccagaccatcaagggtgatatgactgatggctactccgggattcccggctggggcgatacggcagaaggtttcctgaatgacccgttcattgtggagcctgtagagtccgtgttgaagtccggtaagaacaaggggcagacagtaaccaagtgggtgaagcgtgctcctgatgcgactgagacgttgtgggactgcattaaatccattggtgccaaagctgggatgaccgagcaggaaatcatcaagcagggccagatggctcgcattcttcgcttcgaggaatacaattacattgacaaggagatttacctatggacgccgcgaagctgattaccgtcgctgtgctggtaggtatgctggcgcgaggtctctggatgctcgctctcatagtccgagacgtgaagcgagactccgagattaagtgataaactcaaggctctctgtattaaccctcactaaagggaagagggagcctttatgattattactttaagacttaaccttaagaggtgaaattatgttacaaccaattaatcatgttttaactcatcccgatgatattcctagtatgcctcgtgcagctaaagagtatctacaggtgcgcttcaatcagacctatgtgatggagtccggggagtaccgtgcgctacgcgctgctggatactctgagtctttcattgctggtgtgatgcatggtctgtaccttgcctctcgaacacttgatgagattgaggtgcgtaaagagcaactgagacaggagtaattatatgtgctggaaaccgaaggtgaaagtccccaagatggacactaaccagattcgcgctgctgaaccagcacctttgactgagccacctaaatctgtggtatggggaggcgatgatgatgaggacaccagcgtgtcttcctctgaggttccaaccacacagagcagcggtaagagcagtcttaaggtaaagctggatgacaacgcagccaagaacaagagtaaatcctccattcgctccaaggcgtttgggtaactgtgacataacataggggacacattatgggattcctcaagaaaatcaagaaagccgttaagaaagttgtgaaggaagttagcagaccagtcgagaaggcaggtaaggaagtcggtaaagccgttggcggtgcgctgggtgcaggtaagcaggagattatccaacaagaggctccagtaccagtagtgactgcgccacctccagcacagattgtagatgtacctgaacaggataaggctgagggtgaggatggggcacaaaccgagagcgcacgtaagaaggcccgcgctggcggtaagaaggcacttagcgtagcccgtagctccggcggtggcattaacatctaaggaggactgaatggctgattcaaaacgtacaggcttgggcgaagacggtgctaaagctacctatgaccgcctaacgaacgaccgtagagcctatgagactcgtgcggaaaactgtgcgcaatacaccattccgtccttgttcccgaaggagtccgataacgaatctaccgactacacgactccgtggcaggctgtaggtgcgcggggtcttaacaatctggcctctaagttaatgcttgcgttattcccgatgcagtcgtggatgaagctgaccattagcgaatatgaggcgaagcagcttgttggagaccctgatggactcgctaaggtggacgaaggtctgtctatggttgagcgtattatcatgaattatatcgaatccaacagctaccgtgtgacgctctttgagtgcctcaagcagttgatcgtggcaggtaatgcactgctttacttaccggaacccgaaggtagctacaatccgatgaagctgtaccgattgtcttcttatgttgtccaaagagacgcatacggcaatgtgttacagattgtcactcgtgaccagatagcctttggtgctctcccggaagacgttcggtctgcggtagagaaagctggtggtgagaagaagatggacgaaatggtcgatgtgtacacccatgtgtatctcgatgaagagtccggcgattacctcaagtacgaggaagtagaggacgttgagattgatggctccgatgccacatatccgactgacgctatgccctacattccggttcgcatggttcgcattgatggcgagtcttatggtcgctcctactgtgaagaatacttaggtgacttaaggtcgcttgagaatctccaagaggctatcgttaagatgagcatgattagtgctaaggtcatcggtctggtcaaccccgctggtattacacaaccgcgtcgattaaccaaggctcagactggcgacttcgttccgggtcgtcgagaagatattgacttcctgcaactggagaagcaagctgactttaccgtagcgaaagctgtgagtgaccagatagaagcacgcttatcgtatgcctttatgttgaactctgcggtacaacgcactggtgaac

SEQ ID NO: 28 - DNA, 39030 bp, Unknown
  source: /note="Description of Unknown: KP2W-P0108 Bacteriophage sequence"
catcatatcacgatattcaatgataagtctacgaaactctaagcgctccttcaaggtaaacagtgggacgtacttagaggtaaggaaccacactcggtctccctgattaccaccaattgccaacacagcgttatcgctaagcattgccacagtgttctcatcaggaattacctttggttcaacacctagtgcctcagcttccagaatgtcctctatggacggctgaaagttgtcggcatggatttgtaaacactttgtaatgtacataatgctttaacccctcgtatctattagtgtctccctttagtgagggttaattcaccgcagggagactttaagttaaatgccagaagaacgacgaaggtagttcccctcccagccgcacccaatgatgttcagtggtgttgacgcatctgactcgatggttactatgttcgtctgagcgtttccaacaaccgggaagcggtactgccctgtgccaatgttcgacctgccaacacgcagattgtcagaacccaagcgagcgccagccattgtgtagatgaactcacgggacaggttgttcacacggatggtgaacgcgccagaatcctcatagtttacccacgcacgccgaagctgtaagcgaccaatatcctcggtagccgtcgagccatcctcagcagtcttcttaatgaggaacttcgagaacgtataagtgaacgggatgttgaacccaatgtaaaccacttggccctcttggtttccatcgagtctcaatattgggtcgctactccacccgttgattggcgggtctatctctacaatcttcccatcaggaaagaccaccgaaaccatacccttggtgaagttcatcccataaatcgttgcgaggcttatggacgtctggtaggtatcatcattatacgtcccggcagggatggtgtatttcctcttagcgtcgatgtataatctgtaaggctctcccggaatgtctatggagttcttcgtgaagtgcaagcgtcccatccacacagcatgttcattgcccatcaatacagtcattgttgagtttatcacatgtgctgcaaacaccgtaacgttgtccccaaagtcccaatgagaccatgactgctgcctgatttcctcgtcaatgtagaggaacttatagatatacactcggttcggcgcaccgctcgtaaggatagccacgaagttctcagcagttgtgcctgagatactaaataccccattaggtatgtagttcggaacgtgagccgtcatgtcctctgcgttcttcacagagcttacatcctgtaccgcatagtatcggttaatggatgtgaaggaagcgcgaggtgacgcaaagtatacattacgtcctacaccatgtgggcgtgccctgtcttgtacgtcgaactgagtcgtaaggttcaactctacggagcgactcgaaaggataccagaggctgtcagaacgaactgcgcttggtcagaccacaggagcaactcttcggagaacggaacggcatacttcaaggttgacacccggttgtggctaacagcaacgtcgattgggtcatcgtcggagtagtttgacacggaggccgggaagaagttgaagtatttcgaggtgcgagacaagatgatgttctccccactaaggaatcctaaacggttacggaagaagaaaatatcattgattgtctgtccggtaaaggatgggtatgggttggttgtatcgtcccccacagtacgagcaccccactcaaggtacttgaagtcaaagttcccatcagaagcacgtaccagcgcccaaggcatcgtgtggtaatgtaggtgagtccttgtgttccagccaattgtttctacccataccttacggttgaggtcgaacctaacgtaatactggtcggcagtctttgaggtatcaccaacaatcttcacgatgtacccatctggagcattaatcggcaacttctggaacgactgagtgtaatgggttacagggttgattagctggtctgcgtaaccatccttagtctgtagtccccaaacgttatcgttattaggcgcaaggatatggatgaatccggggccaacattgaaccgccacttatttgggtcttgctcattgtttgggttccctaggttattccgcaactgcaccgccagcttctcagcgatagcctgaccatccacctcgttaacgtgtgctggttgtgaaccatctggtagttgcacagcagcacgctcaaccccgttgaactcgattgataatctacgcccatattgtccgccacgaacattaatcagtgcatcgccttggtctttaaagcccggaaggttgaccgattggtcgttactctgcacaaccaccttgcggttagtcacaaaggtataatcagccacagttaccatcctaaggtcttctcgtgggttagctgtacgaacatatgagcggtctccacgtacttggtactccttaccatcgaggtcgaacaccttaatgtcttcaccagtgaacaccacgaaatactgctcgaactcatcacggttgataagatgcacgtaaggttgcgcacccacatacccagcagcgccaagggtcttaaggtgaatcatcggtgggcgcttctggagaccctctgactcagaagaccaaccgttaatctgtacgctaccttgttcagcgaaccggagaatatctggctgttggctgataccacccttgaggttcttgattgattgactaatgagagccatagagcctccttgttattagcggttaagtagaccagaggtgaatgcgtcaccatccagcatgttgtagttgccgtagtctagttcgtactcgaagcacgcacgccacgcttcctgttcctcttcctgcaacactccgtctacctccggcgcaccgaagaagcggttgttaaactggcgggaagccttggtgacgatatagtttcggaagcactcaggcatctcatcgaactctctcagacgaatcaggtttacctgcacaccagaagggaatctgtcggtcttcgcagagcggtcatagagatagccaccacggttgatatattgggtctgaccgcttgttgccattacggacagatagtcagagctaaacggtatcatgccagagaacgcatccggtagaagagtcacaccttcctcaatattgaatgtccatcctcgtgattgaatctgtcggttaatcttattgagtacacgtcgagcattcgcaacgtcagcattcgcatcaccctcaagggttgatactggtggctcaccgatggaagccagaatgtcgttgacggctgatagctctcctgcggtctcaatgttcatctcataagagcgcatgatgttacctcctgttagtgagggtttaaagcaaaaaacccctcagataccctcagagggcacccaaggggttcataaagtaatgaaggaaagtaaatccccggtaaagaccttagccttctacgggaggctatactgctttcacagtgaccttgcagacagccgtcaggccattcacagtagtcgcagtgatgtcagcggagccagcgcccacagcagttacagtaccagaggcatcgaccgtggcaatcttcgcattggaagacgtaaaggtcactgtctgtactgcatcagccggagttaccgtagaagtcagggctttagaagccccaacgtctaagctcatagtcttctgactaagagtaactccagtggggtcgggaattactccgacacctttgggagaacgatagcgccagcagcttctggacgcagaccgccgtgacccatcgcgtacttagcgataatctggtcagcctgatagttcgcacgacgagcgcgctccagagccaagtctttcagtttgaccgtaccaaccgcagagcggtgctggaacaggcccacaacgttatccagagcaaccttaacggtagtgctggaagtcgccgggaaagcgtgcttctggtcagccggggcatcctcacgggtatcaccagcgccaccagcggtcaggtgcggaacctcaaccacttcgaagcccatcacgttacggatagtaccgcgctcagggtcaatcaatgcctgatagtttgcagcgttcggcatcagggcagccagaatcgcagagtagttatcaggagtggtgtagaaggtacggtcagcagccggaacgtaattcttggtcagagccgcacgagcaacggtcaactgagcgataatcgctttacccagctcaaccgggtcagtcaggtcgccagaggtcggcttaaccagagtcagtacggtaggcttaccgagaccctcgatgttctcattggaggcgtcaggcaggttaaccagaccagccagttcagccagtacggcaccgtcagccgccatcgccagagattcacccaactgtgcggtgtactcagcgcgaacgtcgtagtggttcatcgcgtcctcaatgtcgtaaatcagaacgtccgcagtcagcaggccatcaatgtggattaccttctcggtgtgtttgatatccttacgtttgtcatcgaggttctcacccggtttcaggtaagcagctttggtgcgaccaatcacagggaactgtgcggacttaccagaagcaatagagcgcagcatgtgacgaggcatggtcacggaggtgcgagcgaaagccgtcaggacttcaccgccgaacactttcaggaacagcgccaatttgtccgctgcggactgacccttaccctgattagtaccaatttgctgtccgccttgaatgttagccatgttgaatctccttatgttaatttaaagaaaagtttggttactacttgaatcgagttggttctcaatgtttcacctacgggagtgaccacaaagttctgtgctcaggtgattcaaccattgtagtcatctatggtctctccctttagtgagggttaattagaaactggagtcgataaccttctgttctaccatttggcggtaggcagaatcgctacgatagcgcgggtcgctcatagctttaatcatctcagcctgattcgtaaagccctctttctgacgagctactggtttaaccggagtagcacgcttggtaacactacggttggcaggcttaccgaatttcttcgtgtaactctcaccagccagattgataattgctttgacagtcgccaagtctcggttcatcatggcagtctcaagggactcagccgcagccgggtttgttgcttcaaggtgcgtatggattgcgctaaagcgctccttaccaccagcaaaggcaactacctgattgacgtactggtctacaagggcttcctgaccggagatgtaggagtccacaaaggcacgactatagccagcagcttcgagttccgcgtaggatttctcagagatgccatcggcttcgtactcttcgtagatgcgagtcacagactctgcgctcagtccacgctcaacggcctgctcgaccatcgcctgaaagccttcttcgtgctgtcctaattgttcagtaacttggctcagttcttctggagtgtcacccagcggctcaaactcatcggcttcaccttcggtctccacctcagcgttatcgctaccagtgtcgaactcggcttcattaccatcttcactgatacgaacctgaatgcggccctcatcgtcttcaccatcagcgaacgggtctacaccggatgcatatgggtcatcgttatgggaactcggttcctcgctaagtacgattgcatcatcgccgtcacgggcagcaacatcgagactaagcatattctgttcgtgttcagtaggtgtgcttccggtcattaccgcgttgttcacaccgaaggacgcataaacgtctgcattagattcagccattgttaaatctcctaagttgttaaagataaagggaaaccaaaggactccaacctttagtcatcgctcatttcaaagatgaggtctccctttagtgagggttattaggtggcgtctaggccagcctgtgctgctgcaccctgcatagcttctggacttgaggtcgctagagcaccaacaccagccccaccagcggcggcagcgttctcgatacctgtttgggccgcatcctgcatcatcagtgcttgcttctgctcgtccgtcagtaggataccagaagtatcaataccaatggcgttagcaatgcgcagcttaatgacagcaaggttaatgtccgggtctccctgcataggggccagagcagcccaagcggagatacagcgctccagcttatcgaggtcttgaccacgaccgattgcttccagacctgtactgatagtaggctcaacggcttctttcggtagctcaggaatctgcgaggttgcttggagttgcttcaagagcacacgaaccagaggcaattgcagttcttgagacagaatcgaatagacgccaccaagcgtatcttccagttctgacgcaacgtatcgaatctcttcggcggtcacacgttcaccagtgcgttgtaccgcagagttcaacataaaggcatacgataagcgtgcttctatctggtcactcacagctttcgctacggtaaagtcagcttgcttctccagttgcaggaagtcaatatcttctcgacgacccggaacgaagtcgccagtctgagccttggttaatcgacgcggttgtgtaataccagcggggttgaccagaccgatgaccttagcactaatcatgctcatcttaacgatagcctcttggagattctcaagcgaccttaagtcacctaagtattcttcacagtaggagcgaccataagactcgccatcaatgcgaaccatgcgaaccggaatgtagggcatagcgtcagtcggatatgtggcatcggagccatcaatctcaacgtcctctacttcctcgtacttgaggtaatcgccggactcttcatcgagatacacatgggtgtacacatcgaccatttcgtccatcttcttctcaccaccagctttctctaccgcagaccgaacgtcttccgggagagcaccaaaggctatctggtcacgagtgacaatctgtaacacattgccgtatgcgtctctttggacaacataagaagacaatcggtacagcttcatcggattgtagctaccttcgggttccggtaagtaaagcagtgcattacctgccacgatcaactgcttgaggcactcaaagagcgtcacacggtagctgttggattcgatataattcatgataatacgctcaaccatagacagaccttcgtccaccttagcgagtccatcagggtctccaacaagctgcttcgcctcatattcgctaatggtcagcttcatccacgactgcatcgggaataacgcaagcattaacttagaggccagattgttaagaccccgcgcacctacagcctgccacggagtcgtgtagtcggtagattcgttatcggactccttcgggaacaaggacggaatggtgtattgcgcacagttttccgcacgagtctcataggctctacggtcgttcgttaggcggtcataggtagctttagcaccgtcttcgcccaagcctgtacgttttgaatcagccattcagtcctccttagatgttaatgccaccgccggagctacgggctacgctaagtgccttcttaccgccagcgcgggccttcttacgtgcgctctcggtttgtgccccatcctcaccctcagccttatcctgttcaggtacatctacaatctgtgctggaggtggcgcagtcactactggtactggagcctcttgttggataatctcctgcttacctgcacccagcgcaccgccaacggctttaccgacttccttacctgccttctcgactggtctgctaacttccttcacaactttcttaacggctttcttgattttcttgaggaatcccataatgtgtcccctatgttatgtcacagttacccaaacgccttggagcgaatggaggatttactcttgttcttggctgcgttgtcatccagctttaccttaagactgctcttaccgctgctctgtgtggttggaacctcagaggaagacacgctggtgtcctcatcatcatcgcctccccataccacagatttaggtggctcagtcaaaggtgctggttcagcagcgcgaatctggttagtgtccatcttggggactttcaccttcggtttccagcacatataattactcctgtctcagttgctctttacgcacctcaatctcatcaagtgttcgagaggcaaggtacagaccatgcatcacaccagcaatgaaagactcagagtatccagcagcgcgtagcgcacggtactccccggactccatcacataggtctgattgaagcgcacctgtagatactctttagctgcacgaggcatactaggaatatcatcgggatgagttaaaacatgattaattggttgtaacataatttcacctcttaaggttaagtcttaaagtaataatcataaaggctccctcttccctttagtgagggttaatacagagagccttgagtttatcacttaatctcggagtctcgcttcacgtctcggactatgagagcgagcatccagagacctcgcgccagcatacctaccagcacagcgacggtaatcagcttcgcggcgtccataggtaaatctccttgtcaatgtaattgtattcctcgaagcgaagaatgcgagccatctggccctgcttgatgatttcctgctcggtcatcccagctttggcaccaatggatttaatgcagtcccacaacgtctcagtcgcatcaggagcacgcttcacccacttggttactgtctgccccttgttcttaccggacttcaacacggactctacaggctccacaatgaacgggtcattcaggaaaccttctgccgtatcgccccagccgggaatcccggagtagccatcagtcatatcacccttgatggtctggaagagatgccaccaatcagcggtctctttggtctgcgtcaagatgttaccagtggtacaccacaggaagtcaacgtccgggatagtcttgaagtccttatcacaggagaccaacacagccttcttgaagccgaagacctcgtgaccagacccaatgatgcccataacgtcatcaccttcaagcatgtcctctttgatgtgaatgaactcatcgcgctcccacagagcttgaaggaagtcacggtagcccacaggtttacgggtcgccttgcggttctccttgtaagtcgggtctacaagttccttgcgccagttcacatcgtcggtaaacgccagcacaaccgtagcgtcacgccatgctttcttacgggttcggtacgattcgattgcagaatccagaatgctccgcgccttagcgtggtcacactccagagtccaaatgtcatcgccccaatccgtctcaacttcggcagcagccatcgactgatacaccagccagtcaccatccatgaccagcacgcccttctccatcggtttaccttcacgcatctcagcgaagtctttgagggtaatcaaactcataggtcttcctccccgtaaaccatctcgattgcatcagagtatccgtcccaattatccacaccacacgccttaagagcattcaggaactctaggtctttctccagcttatcaatgtacgcgctaacatcattccacgcatcacgagtcatcgttacggtgtcactctttggcataatcatacacaacctcccattcgtttcaggaagcgcacaccagcggatgtgacctcccacgctccaccattacgaccaccaacagtcaaacagctaatgtgtccacgagacgcggcctcagctacgagagccgcattgtttcgcacatagttcgactgaaaggacttagggcaacccttgatagctgcaagcactttcaggtattcactcatttgaacacctcccgcacagttgcaggtgagaatttcatccgcttctgctcggtagagcttaactcactgtgaccatcgcggataaactcacggagaccttgcttgatgcagaacgcagccgcaccttccggcccgtgtgtcagaccttgaataagcagttcttgtttgaacggattcagcttctcgccagacccggccttcttagctaggtctaccagcaactcgttcagattcttctcggattcactgtcaatcacagcagtaacgtcgaaggttactttaaagtgtttggtcattgccataatgtttctcctactgttagtggcagacggcccaatttggccccatcttaccttcggtatctaaacgacaacggaaagcccaatgctctccgacccaacgcatagcttcctgcgcggtgtcaataacaatctgagcgatgtgctcggtacggcaggccacctgaatctcatcgtgaacccaagccatgtacgcaaagtcaccatcccagccatgcttcaagcctttctcaatgagcatctcttcggtcttaataatccacagcttacaaatcagagcaccagcagactgcaacaatgtgttgagcgctgcatgtggagacctgacgtgaaccttgcgaccatccagacctttaatccaacggcgtttccactggactttctgctcaccgccaatccaagcggaagacttaacgagagactgttggatagcttctcgcaatgctgcaatcgccggggtgttctctaagaatttcttcttgagttccttcccgcgctccttccctgccccaacaatctgaccaatcttctcatctcctgctccgtaaaggaacccgtaaatgaaagtcttggcgttgtcgcgtgtcgggagttccgcagcgttctggttcttggtgtgaatgtcaccgttgagaatctcattcgcatactctccgttgtcgaagcgagccatgaagtgtgccagacagcgcaactctaagccactggcgtctatccccgcttgcacccacggcttgccagtaatcccatccaaatgatgttcagcaccaaaagcactacgacactgctccccgtaaggagaacgaacaccgggtatctgtgcaaggtttgggaaactatgagtagcacgaccagtaactgcaccgttagggttaacggctccgtgaatcttaccatcatcttgaacataacgtaaccacgccttgtcaccttctgccgcctgaccgattcgcttctgaatcatcaggtactctttaatcaagtcaatgcacgcctgcttctcagggtcatccactcgtacatgctccaagacctcatcgtccaccacaggcgcacccttctcggtgaacttctcaggaacccatccggcctcctgtagtttcttctgaatgtggtcacggctacttggcttgaacgtaacgaactcgaccggagtatatggagcaccttccatgtaatccctcgtgtccaagtcgcaaggttcaagaccttcgcgctgtgccttattacgaggcttcttgtacacgccaccctgtttcggatagaccacgcgaggataactcggcagcggcttgcctgtccgtgggtgcttgaagagttccttaccacctttcggttgataccacgagccaaacgtttcggttaactttcgcagaagttcggcgcgtttcgctgccagttctacataaagttcctcaatggcctgtgtgttgaacgggaagccgttacgctcctgcttcgctaacagccacgctgcacgatgttcaatatccacagactcgccagcttctcgccagaataaatccgcatcgtacttcgtgaagtccatacccgcagggaagtagtggaggtctgtaaggaatttctctaagagcttgacagtgaccacaacgtcttgaacgttataagccatcatcggctcgttgaacgaaacccactcagcaccatcaacatattcttcgccctgctcttctagcatagccttgaagtcgtccttatattcacctttcatctcgcccaagcgataaccccatgcctccagggcgtgagacccgaagcgacgaccgggtagtttcccggaacgaagaagccccatgtctgtgtctttaaggttcgcatgaagtaaacgcgagagtaccaatgtgtcaatacaattctcacggggtaacttgaagtcacgattgagttgcagctttgctagtttctctaaagccggaacgtcatacttgtgaccgttatggaaaacaataagcccacctcgcttcacctcggcttccagcgcatccagatacgccccgaagtcgcccggacgataactatgatactcaccatcgcggtagtcatagataacgccacagtgaaacttggtgactttctctaagaggttgttggcctcaatgtcacttacgagcataatgccctcctttcatttcaggataaatgataatcataaaggccacccttgggcgaccttgagtttatcacttctcgataatctcttgcataccagcgccgaactctaccagacgctcacggttatcaccgaccaccttgtcagcagccatagtcagggcacccatcaggcggcctacctgcttgtcagtcaaggtcatgcgttgagtgtgtgctttcggagacttgtggtctttccagcggtagaccatcgttaccttctcaccgcgcacattaatatgtactcgacgagcgaactggtcagcggtgtccggcagacggatggtgtttgcgtgagtgattgacttgctcatggtgtgctccttactcaaagaatttgctcatggattgtgctttggctgcaatcgctgccgacttgtggatgccactaacagccgcatcggatttctcacgggactgtttcgccaactcaatggctcgctgtgaatcagctttggccttcttgtccagcttcttggcttcgacgaagtacagtttaactaccagcttacctaaagcgttaatgaatttaaacatggtgtgtctcctatggtttgaggttgttcccgttagtgagggttaatcaattatacattccgccatcacagtctggatgaccgcagtggcactggtatttagaagtctgattgtccgtcttgttcagtccagccagtatctccttctccttcttcgccagtgtagctagacggttcaagccacccggtttctctgttgtattccatgtatccagcaattccagtgtcgccagtgaaacgacacttaagcaggcgaaccaacaccaagttaggcatatcaccttgctggttacgctccaaggcgatgatagtatcagataactgacgcagcgcaccgctaccacgtaggtcagtaatagaaacagcgcgtccttcttcatgtggttttcccttctccgggttcttcaagtgacaaatcactacgagcacaacaccagttgacttagcgaacccttttagcttagtcatgaggcggtcaatcatcttacgctcatccgattcctcagaggcagacacgacgattgagatgtggtcgagcactataacatcacaccctaagcctgttcgcatgtaggccagcttcgctaacagtctgtcagcttcggcctccgcaaaggagtcataaaggtggaacgtatcgtctccaaatagttcgtcataccattcatcgaaacgtccgtcctctgctatagccttcttgacttcatcagactgacgcagacgaaccttattgttcagacccatcatatcctgaatggtatcctcaacggattcctccagcatcgctaggccaacacgtttacccattcgcttgccccaagccagcgcctgttgacgaacgaacgttgacttacccataccggaaccggaagtgaccataatgacttcgcctccacgggcacccaaggttctatcgttcaggccttgacagccatcgaacagcagacccacagcgtcctcggaggtcatagcttccttaacgcggtctttgagtgacaacgcagagacaacaccatcaggcacccaagggttcgcgttccagatctgctccaagattgctttgtcttcacccatgatgtgacactcgttggcgtccttacacggtaacacggcaacacgaaccttaccagccgggagaacctgtgcggcctcttcgactgccttacggcctgcgtcatccatgtcgaacatcaagataatctgctcgaactggtcaaagtattcatagttagcggcgcatgtcttcttagcagcagaggcaccgtgacccaatgatacgaccgggtacttacagtcttggagttccatcacagtgagcgcatcaatttcgccctcagtgaccacaattttcttaccgccagaccagaggtgcttcaagaataacgcatcgctcttgtgacttccagtggtcttaaagttcttgtccttatcgcgcaccttctgtgacacgatggaaccattctggtcacggtaatccgcaacctgatacattcggttgtccactttcgccagccagtagccagccttttggcatgtctccttcgagatgccacgggcagtcaggtcagagtatcgaccgttgctgtcgccgaaattccatacgtcatagctcataggctttctcccatttgattgtctacgttcccgctcaggtctctcaccgtcaccgggcgtccagttctcgcaggcgtaacaataagtatgaccatcggagaacagcgagtttgcatcactgctcccacagttttcgcatgggatgtgatagagaaatatgctatctgaatctagcgaattgtccatgaagttctctcctagttctgtaaatccacgctactacctcaagtaagtccttgctggtggttgtgtattgcttaccgtctgccatcacagcaccacgccacgactgcctatcgtccctccatgagagacccttgaggccggacttgtttgctttggatgttttggcgttccgggagttctccttcggaagagcgagacggagattggacaggtcatcgttaagaggattgccgtcaatgtggtctatgtaatacccttccgggataggcccattagctgctacccacacttgaatgtgtcttcgcggagcctgatagaactgcttgtatggtttgttcatattttagcctccttcgagaacaaagggacggcctttcgactatccctttagtgagtgttaattattcctcggtgtgttcctcagccttgattgggtctttgcactgacactgacgtgacggtacgcgactcttcaacggcttatcacagcgaatacaaatcatcctcatggtatcaccctcggtcagatgtaaccagttcgttcttctcccaccagcgcttcaagtcgaaggacgggcaggctttgggtgcaacgtcatggtgagcacgaaggactgaaccctcatacttcgccagcagcgtgaccagcagactacgcagcgcttgcatttgcgcaggtgtaaagttggcgtcgaacttgcctttatcatcaatcccacccacgaggcatacgcctacggagttgtggttgtaacctttaacgtgggaacctacagccagttcatcgcggcctgcttccacagtaccatcacgcttgatgatgaagtgataacctacgtctaaccatccctgctctttgtgccactgacgaatctcacgaacgccaatgttctggcttggcttggttgctgagcaatgcacaaagattgcctccgtggttgctcgtggtttgaattgaactttagccatttttctttactcctttcttagtctgaaatttatcgaacggaacctccttcttgggttctttgagccacgccaccggtatcagcttgtcagcaaacagaatgccatgcttctcgcaccactcaccgtagcttgttgggctacccttgtagagctttgagcggctgcttgagaagaccaagcgtatgtccagttcggggtgttgctcacgaatcaaaaggtgtttcttgcggtcatcggaatcccacagccctttggtctcaatgaagataccgttaggtagcaggaagtctggagtgtataagtggtcactcgcagggatgacgtaagggatacgccaaagttcatagtcgaacttaattcccttactctcaagctgctttgagactttatcttctaggccggaacggaatgctccgaccttgcgtacacctcgcgcagcgtatgcgccagccattagaagtcctcgtcatcatccggggtttcttcgtgctcgtcttcctgccactcctgctcatcgcgggactgacgggattcactcgcagtgtaaccaccatcttcgacttcatcggcccactcatcttcaccgccaccaccgaaggtagccagttcgaccagcatcacggactccagttgcagcttaacgcttgcacccacagctgtgttccacttgtaaggcaccagagagtatttcactttcagcttggagcctccaccgataatcggaacgtcctgaatcttcttgcccttgctatcgaccacgaccagattgatgtgtttggtctctttggtcttcttatcttggaaagacgcatagcatttgaacttgaaggtagtcgtaccgtcaccgttatcgaagaacggcatgtcgccctcgtaaggtttcagtggtttcttaccacgctgtacctgcggcgggttagcttcgaactcttccacggcagcagcataagcctcttcgtgagtcttcacgatttcatcgaccatcgcctgacagcgcgggtctttattggaaagagtcaggtctaccttatagataccgcgagggttgccgaagccacgctcttcgttgccataatccggcttactcaggtaagcataaggctcagcagtgccaagaccagatgtgtagattttcttcttgaaaccagccatagtatttctcctttggttgatagtttgggttgttccctttagtgagggtaattaggctttcacttctggacggattcgagtaactacgaaccctgcgtcctcgtaatgttcagcctgtagcgttgcctcttcaagagaccgggcgaataccggaatctcaaaggactcggtgttaccttccattgtcagaaggtatttctgttctgagtacatgcagcgatttgcgcaggagtggttctccatccctacgtccttcgcatacttgcacccgttgttacattggctcatttattggcctccttaaagcgccgctcccacagcgcgtacagttgttggtaagcgtcagcagacgccttgtcaccatcctcgatagcttggttccacttagcggcacaccaatcgcaacattcacgaagcgtcataacacagcccccggtgtttgtcaaagagttcctgatagaatgcagctttcttgaggtctttctccatagttgccagttcggacttcttgccagcacgtaggcgatacttaaggatgttccctaagcagtacccacggaacgcctcgacggtcattgaccgggcgataacctcaatggcttccacgttgtcgaacaacatgtagtggttcggatgggtaacatcagacttgacttctgtcttcggtgcttccacgttcggagtcttaacgccagctttcggtagcggaatcaggttgttcgggagaacctcagcgtgctgagtaccgaagcgaaccttgacgcgacctgtgtgcgagtgaccagttaccactccgctcatccctaagatgcgcttgaggccaccgccggagtatcgcaccacagagttaaccgggaagcgagcctctaagtctggtttgttccaatgatgttgcagcattacagcacctccttaatccacttaacgaacagacgaatgcgaggccagtaagtgaccacggcttccagatgaggacgctctttgttcatcgccttgacgaactcaccacgagtaatcagcaggtgaacacaaggtgatagcgtggcgaccgaaccaatcagcggcagcttggcgttgcgctcagaggccaatacggtcgagcggtctttacggcgaaccgaaaagataccgttggatttgttgaaatgtaaacgcatgatgttatctccttaacaatcaggccaaatgttgtcgtcggcagccattaatcccagcgttgcgacgatagcgaataggataagccacatggtgtgtgtgtctcctgttagtgagggttaataccgctgaacgaagaaaggcccacccgttaaggtgagccagtgagttggttacattttctcttgagggttgtcctcagtgcctcggaacttctcgaagctagggtgacgcagggagccatctggagtctcttccatgtagttgacctgacaggcccacccattgtagaagtcttcaccgtgtgccttaacgttggctgtgaactcgtccatcagtgcgcgagagatgttgttggcgtctactaaacgaccagtctcaagaagcacactaaagccaatcactttgccctcgttggctaaaccttcggttccccaattgacaccctgaatgataccatcagcttcacactcaggcttgagcttccaccagccagacttcttgcctcgcttatagatgccctgcgggtctttcacaatgagaccctcgtgaccttcggcacgcttctcttcgtacagttcagtcagcgaatccatatcgtagacctcgtaggtctcagcgataagccactcgatttccgggaagtattcaaccagaagagagcgcatggcttccacatgatacggcatcagcaggttctgtacatcgtagtcctcgccagactccgcaatgtgaatcggcatgaccgcatacaggcgaacactgagtagcttggggtctaactcaaaggctactttggaacctttcagcggctcaacaccaccacggtcaaacatgaagttgttcttcttgagccacttggtacgcagcaggccagacccggtgttgaagtctacacctttgaccatcagttcgccatccagcatgaagccatccgggaagatgcagcggtcatcgttcagtagttgctgccagcgcttatcgaaaccgttcaggtgttccagcgccgggatgaacttggatacgcgagacagccatgcggcctcagccacgttgtcaaccacaatgttaccgcgcacaccatcgtacttaatgtcagcaatcaggtagccggaggtctccagcgctttcttaacggcagactctacgaatgacacagccttatacgggacggttttgaaaatcatcataattaatttcctctttgagtttctctaaaagttctgccgcctgttccttcgtggagcaaccagcggtgataaatgttttgttgcctcttcgacactgaccgtaccaaacttggcggtgtttgtgccagtagacacctttgattcctgacttgttgttccggtgtactgaccgatttctgttgttctcagagcgggtcacaagtctaaggttactaggcgcgttgttaagtttgttacggtcaatgtggtctacttccattccctccgggactgcaccgttgaagtgttcccaaatgagtatgtgatggtttaaccacttaccttcataacgaacccttctatagccgttgcgaatagagccgccagtgtgacgacccgtatcccatgagagaaaggaaggactcattaagtcaaatgaaattctcataatgtttcctcctttcgttctccctttagtgagggttattacttccagtgtttcaaatcgctgtgaaccttacggagccatgcagtctgcgcgttgatttgtacatcgctgtcgctatgctcgaaggttctggatgccaccggatgccctgagcgtgtgaacacgcggagaacctcaccggatgacctgcacatcttcgctgggttttcatagctgaatgactccaccttcacggtcacgtcatggtcttcctgtagacgcgctaccgcatctttgtaatcgttcaggttgccgctatagatacgtcccatcattagttccactcccgtttctgtgagttaccgcgctgttgcttgtggcgtttcttcatgcggtcacggcgctcttgccactgttcgccatgctcgttgaccactgaatcgcgcttggtaaatttctcaaagttggtacgcatagtatcttacctcatgttgatgtgtattgaaagttaatcacaaaggccaccgccggtgatgaccttaagtttaactctcccgttagtgagggttaactgtatgtccgttcgatacgaccacacgttgaacccttcgggtagtagaatgatttcgtttcgttgtcctcagtggtctggaagatgaccatcccggaggacgttgagtaacattccaacttcgtgaccaccttaccgcacggccctaagcctaacttaaattcggtcttgcggaggtcatcactaccgggcatccaagcgtagaacttaacggaagtcaagcggtttaacttaaagatgttcttaaagaaagtcttaatgttaatcataaatttaatctcttagtacctaaagtgtcttaaagagggagaccttaagtagtctcccgttagtgagggttaatgctaagtgcttgttatgcaaaggcaaagtcagacttgagaatgtcttgcaggttcaggtttcctttcttcggaagcggtggcatcttgtccagttgggtctcgtgtagctggtctgcaaactgagagtagaagtctgccagcacatcgttgttctcataggtgataaccatcgtttcacgcacagccttaaagagcttaccagcgtctgccggaatagtaccaaagctgtcatggatgagcgcaaaggactcaataccatacttctcgtgagcataaacgactgtcatgcggaggtgactaccatcctgtgagtgaacaaagttaggtgcgatgccggactcctgcttgtgtgcgtcaatgcctgaatccttgagggtattaatcgtcggttgcagacggaattgccctaagaaaatcatatcaagacgcttctggagtggcttgcggtattcctgccagaccgggaagccgtccggcgtagtccagtgaaccgcgcaacggtggcgcagaatctccttggtcttcttgtccttgacctcagcagccagcagcttagcggcagacttgagccagttcatcgcctcaaccgctgcgactacggtcacgctcaccgcgtcccaaatcagcttagccatataaccagccgcttggttaggttgggtgaacatcaagcccttaccgctgtcaatcgcaggctgaatggtgtcgtccagtacctgttgacgaaagccgaactccttggagccgtaagccagcgtcatgaccgaacgtttagttacgctacgggttacaccatatgccagccactgttgcgccagcgttgaggttcccagcttgagcttctctgagatttccccggtgtccttgtcggtaacggtaatcatctcgttaggtgtgccgttgattgcatcctgtttgagaatctcgtttactttctgtgcaacgatgccgtaaatgtcctgcacggtttcgcttggcagcaggttaaccgcacgaccacctacctcatcgcggagcatcgcggagaagtgctggataccagagcaagacccgtcgaacgccagcggcagagagcagttgtagctcagaccgtggtgcgcaacgcctgcatactcgaagcagaacgcgaggaaacagaaaggtgaatcctgctcggcccaccaagtgttattgattgggtctttagcgcaagccagaatgtcgtctacgtgcttctcaatgaacgcgatgcgctcagggaaaggaaccttatcgacacccgcacagttcgcaccgtggattttcagccagtagaaaccttcctcaccgattggcttgcctttagcgagggtcaacagacctttcgtcatgtcgttgccttgtgggttgaacatcggcacagcgtacacacgaccgcgccagtccatgttgtaagggaaccatattgctttcttgcttgcgaacttgttggcctgctccagcatgaactctaagctgatacggcgagacactcgtgccttgtccaagcggtagataccagcggcggctttcttccactccttgagtgctgcctcgttggtgtcaatgtcgtccggcttaggcggtaactcttggcgctccagcgatggaatgtctgcgaccgggcaattcttccagttaacaatctcattgacaaccgtaagaactttcttgttgattttccatgcggtgttttgcgcgatgttcacagccttgtagacttctggcatgtaaacgtcttcgtagcgcatcaagcccttcttagagtgagtgcgaacgagtgccaaaggtctgcgaccgttagcccaatagccgcccccggtgattgctacccaaggtttcggcggtacgacacatggctggaacatcggagagatacccgccagagcgcctgcacgcttcgctaatacgtccacgtactcttgggccagttgtagtgcctcatggtcagagcctgcgttacctgcgttgtggcgctgtaattccaccagacccgtggattcaatcagcatttcaatcaggcgaatccctacgtgcatcgtggtttctttatcccagctagaccacgcctcaccaccaagcagaccgcgaccaatcatatcggcctcgaccacctgcataaaggctttcttgtagacttgcccgtggcgcttgttaagctgttcctcaacgtgcttcttgaagtgcttcgcttcgaggtcacggatgcgaccgaaacgtgcctcatcctcaatggccttccctagcataccagcagcggcctgaatggttgtcatgttcgtgctggtcagtgacgcaaggataactttcagggtgataaacgcggaggcttccggcttgagtaactggagcggtgcataggctacgggcttgcggcctttcttcgatgcgtactcttcgagccactctacgatacgtgcggttaacttagggagaagcgtagcgagtaatggcttagcggctgcgttgtctgcaatctcaccagctttcgcttgacgctcaagcatcttgaggaagcggcgctcgcctagctcataagactcatgctctaaagccagttgttcacgagccagtgcgctaccgtagtggtctgccagtgtgttgaacgggatagcagccagttcgatttcggagaagtcattcttttcgatagtttcgatgatgttcattgcttacctcgttgtgaataaatcgttcctattcaggccacctcgtgatgacctgtaagaaaagactctatcagccttgcagtctcctgtcaaggtacgcgtctatgtgtaacggtttgccccactgaatgcgcacctcgtcgtgcatcatcattgccgcagcagcgaggcgctccagttctgcaaagtttaggttattgtggtgcacccaagcgttgcgccagtgcttatcgccccacaccatacgcgccctaggctcatccctgcgattctgattggcgtccatgcgcatcttagcgagtaccttagcgtcacgtttagcacgcttagaggcctttctgcgccattttgcacgggctttacgtgctacctgaaaggttcctttagggtcacggcgtgccttgcgtgccttacagcggtcaatcgcttcctgcgccctcagcgcctcaatctcagcgattagttcatccgggtcacagtgaaactcacccggctttaacttgttgtctgcgctgaacgataccgggtctgtgataatcaagcggcccatttggtctttcatcatgttaccgctgtgacaatcgaacgatgcaatgcctaggaagaacttgcggatatccttgcaggtctcaatgaacccgtcacttatcgggtactcttcggcggtattgaagcaatcctcctcaatgatttcccttgcagcgcggaagtggtggcgaatcttatcgctttcaccgtagcaccaatcgttaagcggtgtcagatagtccaagaccaccgtgtagcagcctgcatgacgctgaatgtcgtacaccgtagggataccctcccgaccctgattcatacggcagaaggctgcataggctgcgcctgagtcctctttcttaaagcctaccttgatgaccttgcccggtaacagtgcgtgctcatatgctgcgctaaagtgaccgttacccaagcgtacaaatccaacatcacgcatacgctcagccagtgtctgccagtagtccatatcttcgagcgacgtgtttcctgctgcctgcgtcagttcgccgtcctgagtctcatcgttcacgatagcagccgcaagagccaccagcattggctggcgttcgttcaggcgctcaatcggtaggttgcggatagcttcgagtgcggcttgtgcttcggtgaaagtcatcgttcagtgtcctgttatctgtaagaagagtaaagagtaaattcagcccatttgacagcgcttgcagcctgtcgtgcggtcatcttgcggtgtctcgttaagatgcgtttgaccttgcgtttcgatgcaccataagccatcgcatacagtgcaatctttacgtgctttgagttagtgcgtagcaatgtagaatactcctaccttgttggctttaaagcgtccgttacgttcacgaaccgtaaaccgtgggatgaatccccacttaaagtaactcagcgttgccttgtgtattgccagaccgcgcttaaagtctcgcataaagtacattgcgatgcatagatagaccagtgcgattagtgcgataatcatttcttaatccatacctcgtacacaaagttgattgcagcgggtattgctatacagagaattatcaggttcttcgtgtcttcgtatcccatactctcatcctctatcgtaatgttaatcataaaggccactcgcatggagcgaccttgagtttaccacctgatagacttgaagcctgttgtccagtgattgcaaagcgcgttatcaatcattccagcccgcacatgttgcttggtgtaccacacaggcttgataatcctcttgtgctaaaatcgggtttacccaatgtgtgacctgtttaccataccgcacaacgtaggtgcttcccattgacccgtggtaatactcacgcagtgttacggtgcactggcctgctattttggatgttgccagtaacttactcattacataacctcccatacagccgtaccattaggtaaacgcttgccgaagccttgttgatccctgaatcgggcacgagcgtccctttcgttgtacccgtagcaggtcattgagtagcaccagccgggaataaggatggcgtattgtttcatagtcatatcctctcagggttatttagtggtaatcataaaggccacactcagcgtgcgaccttgagtttaacacttatcgtacttgccagcggcgaccgaactcgtcaatcgtaaagcagccttgcagtggtgcgcctttaggcacttcttggaagctacccggcagacgttcagccttgtaaccgtcgatacctttagcgtacaccagaccagccgtgtgagtctgtgatttgtataccagtacgcaatcttgctcccactcattacaagctaagcgtgcaacattgagtgcctgcgccttgtccttgcagcgtacacgaaccgttttttcctcagtcggtgcgcttgcgattgcctcacgatagcacccggtcaaatcggttgactcaacggagccataaagacccggtgcggcacgtaaagtgcttaccatgtggcggtggcgactcatgttcacctcatcgtcgaggttggaacggaaagctgacaccagtacatagaagacgttagcaggctctttagtgaaaatcatttggtgttacctcatgttagttcatgttaagtgaatatcataaaggccacgcttttagtgcgaccttgagttattcgcttatacatcggtacactcaagagctattatccagattgttaaagagcgtgtcggtctggtttcgttagaccctagcggctttcagtgtcccgcctcactgttccgtcatttcgtggtacatcgtaccgtgtttacttcatgttgtcaaccgttttgtttcactttatgtgccgtggtgcgcttaagtcacctagaagacaccttgtgtccggttgacgctgtgtatcttactgcgtttacttcatgttgtcaatgcctgtttttcgtatgacttatcaggctgtctacttatccggttgactccggtatctcagggagtggctttaaggccgttgtcccgttgacgagatgaataatagccttaagggttacttaaagtcaaccattaattttaatcttttattaaatccctaattcccctttaagtatcccttattcccttattccctttagtgagggtaattgaattgacgatagacaccataggcaactacaaggcatcactacaggctaacagtgggtctatcggtctggttgtctttaagatagcggcgctctttaggtgatggctttaggtgatggctttagggtttactttaggaggctaacagatagggacacatagagatgtactattgaactggtacactaggacactctttaagccctcattaagccatccaccactttagatattgactttaggcaacactttaggctatcctataggccactcgagtagataccgtagtgagttatcgctacactcaaggttaaccgaaggttaaaccctaggggtagggctggctttaggtggctttaagagggctatggggggtactttgggttcttgaactgtgagatacccattcagatttttgtagtaaattcttaaagggtctctttaggaacccactttaggtaaggccacaccataggtgagaccataggcgcatcccgaagggatagctaggagacaccagaagaccctgtaagaccattacgaactacagggcatctttaggtataacctttagggttgactctacagggatgagttggtgtagtgaaactatacctacgaatccctcagagccgcttgtcgttcatcaacaataatttaatccccacaagagagtatagagcaaaaggccacttccagttgaccgaggtggtcattaagacctgcgtacccaagggcagcagtaagtaccagaagaaatcgccaagtgactctatgacgcagcagggcaatcagcaagcgtaacattgagccacctcctttcagttgctctaaggtagggtgattatacaatgataatatcaccaatcatagaggagacttaaagtgcataaagggtcattgcataacctgaatgactaacctatatagtagctttaagtcccctctctccctttagtgagggttaattcaaactcattgattcttaaggaatttcttaaagtgaccatccgtggtctcaatgattccttatgcactcaatatgcataactaccagtcaatgaacctgttgctattcacatcgtcatcctcccaatagagttccataccgtcaaccatagaggtaactacatgaccagccgaatggattgggtgctccatgtgttcctctaagaacgcctcaagcacctcagcttccaccttcacggcgtccagttccatcgtagagcgtaagaactccacacccaatgctaatgcatcaagtcggtcgtcatgggccacagcgcccttctcacgggccatacgggtcaactggtagaacagcgaatagcgaacatcatgcttgccatcagcgtcacgggcagtctggtagtcctcacgaatcacctcgtcacgaatcacaaggcggtgcgtagagagtacaggctccagcgtatcacaaatgcgtagttccttcataccacgagcacgaatctcttcaagttgcgctgcatggtgtttcaggagcacagggctgaataccttaccaaacataccatccccgaagttactctcgaagaccactgtctgaaccttccactgcttcgctttcttagcgagggactcaagggtcttatcggaataaccatcgcggaacccgccagcttccatcagatagatgtagccattcagggtgaacaacactgcgtaacctgtctcatccttaccgcgaccacttgggtcaatcacgaggatgcgttgctggtactgtccagtgttctggctgcacgaatgatagctatgaatatcatcacccttaaggcccacgttaggaagctcttcattgcgattctgacggttcggaagccactggtaatgcattggggctttctcgaagtccagaccgcacacgatagcgtcacggaggcgtaaggggtacttctcggcatcactcaggttcgggttgagcatgaactgcaaagtgaagccagccttaccatattccaactcacgctcccggaggtcttccatatcgaagcgcacggggtcagtcggttgaccttggagcatctcgaacccatcgttgaactcttcgcggagcatcggggccagacggtcgccatagtacaagtcttcctcacggctacgcggatagagcgcaggccagatgattgtggtgtacccacggttatcttcgagttccttgtacaaggtcatttcggtttgaggcgtgccaaggtagataacgcgagaagtcggcagcggtttcagaagcgcagcaaattcctgcaccagagtccacagcttctcacgggcaccttgagttgcggagttagacggaatctcaacgtcatccgctatgatgatatcagcacggctaccagtcaactgaccagtgatacccaccgacttcacagacggagagtggtcaggcttggcagggccaacatcgaaactaatcacagagtcacgctgaccggggcgaggctttagctcagccaagaagggcagcaggtcaatgatgttcttgatgaagatggagttagcgtccgcacgttctttggatgcagagacaattagtatcttcaactgagggtcacgccataacgtccacacaacgaacgcacaggtgatgaatgacttaccaataccacggaaagcctgtaggataaacttcttgttgtctccgttagccagacaccgggccatatctatctgacacttagtcggcggcgggagagccaaagccttccacaatacgaacaggaaggccacgaagtcacccttaagctgcgcaatgattagcgcattacggtttgcttgggtgtcgctcattctgcatctccttaatagtacgctggagcgctcttacgtgagcatcagcagcttgggttattccgataatacgcttagcatctgactcgtgtagttcggctcgaccattaaactcgcatctaccgttatcttctggtagtccggtaagggtcttgatgcggactgacagccgcttattattactacgcaggtcattaagcatcctatcagtgctgccctcaatggctgcaatctcttcttggtactcacgggatacccgactgacctctgcctgagttgctgcggttgcttttgttttcgcaatgtattcattttggattacctccttccagtttgctctctcatgggttgaccctaagtgccagccacccataaagagtgtcccggcgagtacccaagggagtgcgctgcgtaaaagttttagcataacacctcccatcaattttagacttcacgtagatgcaccaaataacatccataaaggctccccacgtggagaaccttgagtatgtcacttactgtagcgtgatagtctcatcgtcagtcagaccattagggccgaccactttgttgtagtcttccagaccagccgcgagaccaccaaggatgttctcatccggggtcagcttactgatttggaacttatggcggtctaacagtttgccgattgcgttgtaaagctgcggcgttcggcgctcctcgctctggaggtcagcaagcatacgctgtgccatctccgtgtccagcatctccagcagcttgattaaagtcttgtcgctcatgggttactccttatttgcacgtttccagtcaatcatcttatcgactaccttggcaccaatctgaaccactgtgtaggcgatagctgcaacgtagaaccactcgtttaacgatagtccccaaaagagtcgggccgccccatcagcgacccctgtgccaacaataggcgcagccttaacgacctcgttattgaagtcaaaagataacattcttgttctccttatgttgtgccgtcctctggctttgttgattgtccttcgagttctttaacgcgttgacgcagtgcctgaatctcagtgattacgtcagcaagcaacgccctgtcgttggtattcaaaagactaccttctgcggtggtcgtgaggtatgtgtacagcgggtcaatcgtgtcaagctgttgggccagccacccacgtttacgttccccggtggtaatctctgtgtattccactatgccaattgcgtcaatacgctcaccagcaccatcaagaggtttagtgatatcatccttgattctaacatcagaacctgaggtcatcacatcaccaagtggtgtagatattttaccattggagaatagctgccagttagtatccttgctataaccattgaggttaaggattatcgcgtggtctgtaccaacgtgctcctgaatatacataccacagtacgcaccaagtggatcattcttagcaccacggccccgaagctgtgagcgaactgccacagaattgaggtattgaccgatggctggattaggtggcgcatccacatatgcggtgatatcacccttaactcgcgttggccctgtaaagtcaaacctgttggtatctgtaataacaaaaccagcacgtaaggtgactgaagtaccagacacacggtagttctcaaagtgcatgcccccagcatcatccatataaatcctgttggcatagttcacgccattcacggtcttatcttggtatagcccactgtggttcagtattgatactttaccgtttcctttaatggttaagtcacccttcatgacaacattgttaccgttgactgaatcaatagaagcagcaaagtcattcatgttagtcagcttagcagcctcctcagaagccttagcagcactcgatgcagcgttagtctcagaggtcttagcgttggtctcagaggtcttagcgttggtctcagaggtctttgcattcccctcagacgtacttgcggcggcggcactcttggaggccttccgtgagtagtgatacgcagagaactcgctaccctgaaccggagagtcctctgtacgctgcgcccattgatgcgcgttgttctcggaggtctttgcgttgtcctcagataccttcgagttgttctctgaggacttagcggcctgttgagatgcagcagcggcctgttgagatgcagcagcagccttcgcagagttcagcgcagactcattccatcgagagacttgacctaaagttattgcatcaccggggtctttagcgtccgcaacgttcacgatacgacgaccacgagcatccaagtcaccatcgttgttaacgccaatcgtatcagcggtaaggtcacgcgcttcctcagcaacgtggagggtctgtacctgcgagatgttcaggtcatacgcacgtaggattgagccatccgtaaagtcaaccagcctatcggtagcggaggtgaatcgacggatttcaatcatgttataaccgtccgctggccccaacgctctcgttgtggagattgtggtcttagtcgcaaaacgatagtcttgattcaagatgagttcctttcggtcaacaccgataagggtcactctgacgaacttacgcgccagatactcaaacggaatattgaagtccgtagtggagccatccagcgggtaagtcatcacggtcttaatagttgtagccatgtgacctcctttgtaaattagcattaagagagaagaggccagaatgtgacctctctccctttagtgagggtttattgtttcttcggcgtctcctttatgcggataccgttggcctcgtagattttcataatgagttgctgcgatagcgggtcattaggaatcaactcacgagaggtgttgaagagtcctgtacggaactccagagcggtagccttgtttggagaagatagcagggaagcggcgttaattgctgttgcgcccacagaacccacaaaacctaaacccggaacctgctcaccaactgcacctgcgatagttgaagccacctgtctacctgtcactgccttggtagggtcgcgcttctcggactctttaggtagtacagtagagcgtgtgtacttataggtatcgctaccaaccatcccagcgaacatgtcgtagatactcaatggtgagcctaagtgtgaactacgagagattgacgcatgagcaatcatcttagggtcaagggcgttcttaaggtactccttacgtttgtgctcctgtagacttgaggccttaaggtgcgcctgcgcaacgtagtaaccaccagctagacccaaagagacgatgtgggtcagcgcttggtctaacgctcggttgttcttcgtggcctcatagaagctgcggacgaaccgggagttcagtgacttaatgacgaagttcttaaactgcatcaccatcttgaccccagcaccgaacgctttggcgtcctgtgaggaaaccttgtgagggcgcagtatagtctcatcagccaccttgtcagccagacgccacaagtccattgagcgtgggtcgttagcgaaagcctgtttgtcacgaatggtgaacttaccgtcttccccacgagtcgcatagtctctgaacaactgcttgattccattccactgctcagggctgatagaggcagacttaaggtagtttgccttaccgaacttagaggctttcccagcaagggccgctccagccacatccccaagcacaccctgacgggcagcatcaagaatgtagtttgatgttccgtttaggagcattgtccaaggggagcgtgcagccaactcttgagtaccgaaacgaatcgtaccgaccacattggcaaccgcagcgctggtgtccgtagactcccggagtcggcgcacgtggtcttcacgtcccggacggattagttggtcgagttccttaccgaacaccatcccgtgtagctccttaatctcagaggcacgaagcggtttaccacggttgacccaatcgttaatcatagggatgccatgagttatcgcagagacgttacctttagccagcataccagcgatttcagtgatgttctgcgcacccatgtaggcgttcttagcgaagaacgtaaggtcattgacggagcgtagggctgtgccccaagcgccttccgggttccttcgagcacgaccagttagaatcttcacggtatccttgagggcttccacttcacctttcagtgtgccgttgccctctgactgcttatccagcgccatgatttcatctttcaggtctttggtagtcttaccggaaccacccatgattgcaacatcaccatctactcgtcggtcgtatgcaggcagaatttcagccatgtcatatgtacgcaggtcgttcacagagaacgtgttaccatcagggagagtcaccgccatgtcactgtcgaacatgttacgggcttccaagaagttgttgttctcgatacccaccagaccctcaatgttatcctcaatgacagaggaggcagagaactggtcggtgtgtgaaataccatacgccttatccatcgcgtgcttctgcaccatctcaggcgtaacttcctgcacggatttgagaccgttaagttccatcaggtactcatcgaccctcgccttgacttctggacgagcacgataagacgtcaaccatgactccgcgattgctcgctgcaagccatcattaccgtaacgtttaaccatctcaatctttatagcgcggtcgtacacgtttggcacgtaggttcccttgtggcgtgagccggggaagatactgaccgccttggtgttgccgaagattgacgggttctccatgatttcgcgtttgaggtcaaagtgctgcttgaggatgttcatcacattccgctcaccctttgtcagatttgcttgaagctcaggccgctcaatcgctaaggctgcacgcttgtagatttcctgtcggatttccttacggctcatcttggaaccaccggtggagaactcagggtctttcattgcagtacgcacagcatcataaagctgattgtaggtgcgctggttgttcgcgtggagtcgctccttaatgtcagaagctgtcgcaccgaacttaccagaagtcccggactccataccagtcggagagcgcacaaggtcactcgcaatggagcgaacagtcgggttctcagagcggagagtcttcaagccaatctcagtgaaaccacccaaagagataccacgagcggcacgctcagggttgaccgcctcgaactcgctaagagtctgagggttgagtgggttggtgtcgctcaggatttgaccttgaggcaacacaactgcacccggctcggtctccagaggtgaatactcaacgccagcgtgctcacggtcgaacacatggttatcgctaggcatacgggtcaggtcttcgccaccagagttcagagcggtctcgcgggcttccaagcggtgtgccataggagcgaagtcattaacgacctcagtcccacgggaacggcgaataccagcagcgatagcgtcactgattgcactcataccggcaccgaacatgagaccacctaaagcagcatcagcgtagtgtgcttcaccaccagctattgatgtgcggataccctcagaggcaacagctaggccagcactttgagtaccgacaatgaaagccttgttagccaccttgagacccttcccggctacacccactagcggcacgtaactcagcgggtctacaccagcaccgacgataccagcagtaagtttggcaccaacacccgcatcggcagaccgcgcgtccatctcgtagttgtcattcgccatcttaatgagggcgtccagattctcaggagagcctccagtgactacattgatgtacgatgggttcttcacctccttacggatacgctctaactcttctggagtccacgtatggctgttccagcgagtcggcgtaatggtgtccttgaataaatcaaaaccgtcatcactacgagcggcacgaaaagccacacccaatacggagttgtgaagttctgcacttgtggcatctccgattccgaagaaggttgaacgagaattaaactcgtccagtgttgttccagtcttttcccaaaagtccttagcataaggcacgttaggcgcttgctgctctttaccctccactttgaatccagtggactccggcaggtcagtgcctaccgtctgcttcttcccgattccagcaaatgcatcccccgatggaatgcccttagcctttggggtgataccgccgaacgcctccaagtcccccttgcgaggactgttggctacatccatcaggttacgcatgtagtcacgaccttcctcagagattgaagcccaatcgcctttgtcataagcctgtatctgtggagcaccgttgcgcccctcgccctgattatacgccaaggcagctttgagttcatccccatcgtacttccgaatgaggtcactcaggtgacgagcggctgcatccacagccaactcagggttgtaacggtcatcgtcatcagcgtcagtaaccttgaggccaagcgcagtggctgtacctttggtgaactgcatgagacccttcgggcctgttggggatttggcctttggattaaagctggattcgttgaatgctaatttacgaagcaggtcataggagaccccatgattgtctgccgctttttgaaataacccatcgaactcgctaggtttgttcttatcgtagctcatggagcctccttatcactgttagtcttctttacgtccatagatatacttcggagtcttcttccgtttatcttggacacgtttacgcgcttcttcacgcgcctgtgttgcacggcttattggggcacgcttgttggcctctttgagggctttctctcgtgctgcctcagcttgcatctgtgcggtacgctggtactcacgctggagtaactcttggtcataccgaatgcgaacctgtccggttgtgtccatcaggtagattgaatcaccttgctggtacaccgacagttgcttgttggtaatccaagggttcgccgctgtgattcccttaatggcttcgtccagaatgttcttcccttgctcccacgacttagggtcatccgaaacagtcaggatgttcttcggtaggacgccgtaggtatcaccctcaacatcgctactggagaacgtggtcgtcgaatcggagaggaactttgcgacctgttcggttgccatgtcagggttccctgtccggtacttcacggaatcataaatcttcctggcatacccttggacactcgaaggcatgtacttgatttgaggattcgttgaatcgttcatcatagcggcccacgctcggtcatcctcaaactgcatctccttggtcttctgtgcgcgggccttatcagcgtcgataagaacctgcgtgtcgatgccttggttatccaacatgtccatcgtcaggaacaactcggccttgtcaggatacagagaggcaatcaggtcagggtcagtgttgcggatgcgacgaaggttgtccatcgctggtgtgctctcaggcatcttgccgttaatcaccgcagcctgccattcgtttccagcatcagtaatcatctcaccaaacgctgcacggaaagcaccctccttggagtctgcccgtaggtagtccaatttcagtttgtctttctgttcaggcgttaagtccatcgcctcgatttccgctaacttctggttcgcgtagttgaccatatcactatgtgtaaactcaccagtgttctcgttggtcggcatgtccttatagttggtcgagacgtattcaccgttgaggcgcttctggaactgcttgtcgatgaccaaagatttattcagggtcttctgttgcttgtccatcagcttggctgtctcagcttgttcctgcttgaagcgggtgcgcatctgttcctgtgcggaaatcaaccactcacgctcaggagtcatctcttcacccggctgaatcttatcgagttcggccttgataccttgaagagtctcccaacctttaccagtgtccgcttggttaagcgctgagttaatatccagtcggaacttctctgttaacttcgcgttgttctggaattgagtgtgctgtgccttaatcatcatggcctgccactgttcatcacccatcagttcacgataggtagtcgtagcgccatttagagttaccttgcggttctcaatgttctgcaagaaggcggcaccacccggacgctgtagcacgtcattcagggacgaagagataacctgttgagcctgattgtcggtcatccctgtcaccaaggagttgtcgatgtagttctggaagaactcaccggactcaggacgagacagtaggtcagggtcagacaggacaccattgagttcaaccttcgagttcaggattgcacccttctgcgcttggtcactcaggaaggtatcatgtgccccatacagagcaatgttacgctcggtgatattcgcgttgaaacccttcaggtattcctcgtccatctcattgatgccgaactgctcagcgaacgacttcgagtgctcctgtaggcgtgagtgacgatactgctccatctcttcacgagtacggaagcgaccctctttgatggcctgttgaacctcatcgtcaacgaggaacgcagcgttacgcccggtcttgaacttcaaggcttgcattgcgtatgggtcatcctgatacagcagtgtaccattctggatagcctgtcggcgctgctcaggggtcagcttacggataatctcgttggagcgctcatcggctcgttgcttatcacgttcatctttcgccatgtacatatcggcaccagccttagcgaatcgaccaatggagtccagaagactcgctcttggttgttcagcctgaatggttgctgcccggtagtccatacctttgacgccccggagtcgttccataccgggagtcgccatgttgcctaaaacactatttagtttactagccattattacctcccggtcttggttcctttggcggcactgataggtgctgcttggtttccacctttcttgtcaaatccaccagccgcatattgacttgcagcttcctgacccataatggacagagggtctagtacacgcatcaggccggacttacctttggcctcgctcttgtacattgcatcgacttgacttgctgtggactgagtgcgtcccaactgttgcgcaaagatactagcgtagtctcggcggtaattctcggtgacactatttgcctcccgaatgtagttgccctcttcgatacgcttgatgcgcttcattgattcgccttctagcatactctcgccgatagctgcacggattgttcccatagcctgtaccttctgcatgttacgtgtagtcaactcagaggatgcagcttcaagggcgtctcgttgttccaatgaggcgttggcattctggatattcgtctctttgaccatctccattgcctgtcggcgtccagcttctgtctgtgccactcgtgccttgtcagcactgttctggctactcagagcttgggcacccatcatggcgataggaatcgctgccatccagcacatagttacctcctactgatagtgaataattgaaattgaccatcagcggtaaactcattatggaataccgcacctatggtctttaggaaacgaatgtgtgacttattgcctacccaaacgaaattccaaatggactcatactggctcagcatcatatcacgatattcaatgataagtctacgaaactctaagcgctccttcaaggtaaacagtgggacgtacttagaggtaaggaaccacactcggtctccctgattaccaccaattgccaacaca

SEQ ID NO: 29 - DNA, 39030 bp, Unknown
  source: /note="Description of Unknown: KP2W-P0109 Bacteriophage sequence"
cctcgcggtatctataaggtagacctgactctttccaataaagacccgcgctgtcaggcgatggtcgatgaaatcgtgaagactcacgaagaggcttatgctgctgccgtggaagagttcgaagctaacccgccgcaggtacagcgtggtaagaaaccactgaaaccttacgagggcgacatgccgttcttcgataacggtgacggtacgactaccttcaagttcaaatgctatgcgtctttccaagataagaagaccaaagagaccaaacacatcaatctggtcgtggtcgatagcaagggcaagaagattcaggacgttccgattatcggtggaggctccaagctgaaagtgaaatactctctggtgccttacaagtggaacacagctgtgggtgcaagcgttaagctgcaactggagtccgtgatgctggtcgaactggctaccttcggtggtggcggtgaagatgagtgggccgatgaagtcgaagatggtggttacactgcgagtgaatcccgtcagtcccgcgatgagcaggagtggcaggaagacgagcacgaagaaaccccggatgatgacgaggacttctaatggctggcgcatacgctgcgcgaggtgtacgcaaggtcggagcattccgttccggcctagaagataaagtctcaaagcagcttgagagtaagggaattaagttcgactatgaactttggcgtatcccttacgtcatccctgcgagtgaccacttatacactccagacttcctgctacctaacggtatcttcattgagaccaaagggctgtgggattccgatgaccgcaagaaacaccttttgattcgtgagcaacaccccgaactggacatacgcttggtcttctcaagcagccgctcaaagctctacaagggtagcccaacaagctacggtgagtggtgcgagaagcatggcattctgtttgctgacaagctgataccggtggcgtggctcaaagaacccaagaaggaggttccgttcgataaatttcagactaagaaaggagtaaagaaaaatggctaaagttcaattcaaaccacgagcaaccacggaggcaatctttgtgcattgctcagcaaccaagccaagccagaacattggcgttcgtgagattcgtcagtggcacaaagagcagggatggttagacgtaggttatcacttcatcatcaagcgtgatggtactgtggaagcaggccgcgatgaactggctgtaggttcccacgttaaaggttacaaccacaactccgtaggcgtatgcctcgtgggtgggattgatgataaaggcaagttcgacgccaactttacacctgcgcaaatgcaagcgctgcgtagtctgctggtcacgctgctggcgaagtatgagggttcagtccttcgtgctcaccatgacgttgcacccaaagcctgcccgtccttcgacttgaagcgctggtgggagaagaacgaactggttacatctgaccgagggtgataccatgaggatgatttgtattcgctgtgataagccgttgaagagtcgcgtaccgtcacgtcagtgtcagtgcaaagacccaatcaaggctgaggaacacaccgaggaataattaacactcactaaagggatagtcgaaaggccgtccctttgttctcgaaggaggctaaaatatgaacaaaccatacaagcagttctatcaggctccgcgaagacacattcaagtgtgggtagcagctaatgggcctatcccggaagggtattacatagaccacattgacggcaatcctcttaacgatgacctgtccaatctccgtctcgctcttccgaaggagaactcccggaacgccaaaacatccaaagcaaacaagtccggcctcaagggtctctcatggagggacgataggcagtcgtggcgtggtgctgtgatggcagacggtaagcaatacacaaccaccagcaaggacttacttgaggtagtagcgtggatttacagaactaggagagaacttcatggacaattcgctagattcagatagcatatttctctatcacatcccatgcgaaaactgtgggagcagtgatgcaaactcgctgttctccgatggtcatacttattgttacgcctgcgagaactggacgcccggtgacggtgagagacctgagcgggaacgtagacaatcaaatgggagaaagcctatgagctatgacgtatggaatttcggcgacagcaacggtcgatactctgacctgactgcccgtggcatctcgaaggagacatgccaaaaggctggctactggctggcgaaagtggacaaccgaatgtatcaggttgcggattaccgtgaccagaatggttccatcgtgtcacagaaggtgcgcgataaggacaagaactttaagaccactggaagtcacaagagcgatgcgttattcttgaagcacctctggtctggcggtaagaaaattgtggtcactgagggcgaaattgatgcgctcactgtgatggaactccaagactgtaagtacccggtcgtatcattgggtcacggtgcctctgctgctaagaagacatgcgccgctaactatgaatactttgaccagttcgagcagattatcttgatgttcgacatggatgacgcaggccgtaaggcagtcgaagaggccgcacaggttctcccggctggtaaggttcgtgttgccgtgttaccgtgtaaggacgccaacgagtgtcacatcatgggtgaagacaaagcaatcttggagcagatctggaacgcgaacccttgggtgcctgatggtgttgtctctgcgttgtcactcaaagaccgcgttaaggaagctatgacctccgaggacgctgtgggtctgctgttcgatggctgtcaaggcctgaacgatagaaccttgggtgcccgtggaggcgaagtcattatggtcacttccggttccggtatgggtaagtcaacgttcgttcgtcaacaggcgctggcttggggcaagcgaatgggtaaacgtgttggcctagcgatgctggaggaatccgttgaggataccattcaggatatgatgggtctgaacaataaggttcgtctgcgtcagtctgatgaagtcaagaaggctatagcagaggacggacgtttcgatgaatggtatgacgaactatttggagacgatacgttccacctttatgactcctttgcggaggccgaagctgacagactgttagcgaagctggcctacatgcgaacaggcttagggtgtgatgttatagtgctcgaccacatctcaatcgtcgtgtctgcctctgaggaatcggatgagcgtaagatgattgaccgcctcatgactaagctaaaagggttcgctaagtcaactggtgttgtgctcgtagtgatttgtcacttgaagaacccggagaagggaaaaccacatgaagaaggacgcgctgtttctattactgacctacgtggtagcggtgcgctgcgtcagttatctgatactatcatcgccttggagcgtaaccagcaaggtgatatgcctaacttggtgttggttcgcctgcttaagtgtcgtttcactggcgacactggaattgctggatacatggaatacaacagagaaaccgggtggcttgaaccgtctagctacactggcgaagaaggagaaggagatactggctggactgaacaagacggacaatcagacttctaaataccagtgccactgcggtcatccagactgtgatggcggaatgtataattgattaaccctcactaacgggaacaacctcaaaccataggagacacaccatgtttaaattcattaacgctttaggtaagctggtagttaaactgtacttcgtcgaagccaagaagctggacaagaaggccaaagctgattcacagcgagccattgagttggcgaaacagtcccgtgagaaatccgatgcggctgttagtggcatccacaagtcggcagcgattgcagccaaagcacaatccatgagcaaattctttgagtaaggagcacaccatgagcaagtcaatcactcacgcaaacaccatccgtctgccggacaccgctgaccagttcgctcgtcgagtacatattaatgtgcgcggtgagaaggtaacgatggtctaccgctggaaagaccacaagtctccgaaagcacacactcaacgcatgaccttgactgacaagcaggtaggccgcctgatgggtgccctgactatggctgctgacaaggtggtcggtgataaccgtgagcgtctggtagagttcggcgctggtatgcaagagattatcgagaagtgataaactcaaggtcgcccaagggtggcctttatgattatcatttatcctgaaatgaaaggagggcattatgctcgtaagtgacattgaggccaacaacctcttagagaaagtcaccaagtttcactgtggcgttatctatgactaccgcgatggtgagtatcatagttatcgtccgggcgacttcggggcgtatctggatgcgctggaagccgaggtgaagcgaggtgggcttattgttttccataacggtcacaagtatgacgttccggctttagagaaactagcaaagctgcaactcaatcgtgacttcaagttaccccgtgagaattgtattgacacattggtactctcgcgtttacttcatgcgaaccttaaagacacagacatggggcttcttcgttccgggaaactacccggtcgtcgcttcgggtctcacgccctggaggcatggggttatcgcttgggcgagatgaaaggtgaatataaggacgacttcaaggctatgctagaagagcagggcgaagaatatgttgatggtgctgagtgggtttcgttcaacgagccgatgatggcttataacgttcaagacgttgtggtcactgtcaagctcttagagaaattccttacagacctccactacttccctgcgggtatggacttcacgaagtacgatgcggatttattctggcgagaagctggcgagtctgtggatattgaacatcgtgcagcgtggctgttagcgaagcaggagcgtaacggcttcccgttcaacacacaggccattgaggaactttatgtagaactggcagcgaaacgcgccgaacttctgcgaaagttaaccgaaacgtttggctcgtggtatcaaccgaaaggtggtaaggaactcttcaagcacccacggacaggcaagccgctgccgagttatcctcgcgtggtctatccgaaacagggtggcgtgtacaagaagcctcgtaataaggcacagcgcgaaggtcttgaaccttgcgacttggacacgagggattacatggaaggtgctccatatactccggtcgagttcgttacgttcaagccaagtagccgtgaccacattcagaagaaactacaggaggccggatgggttcctgagaagttcaccgagaagggtgcgcctgtggtggacgatgaggtcttggagcatgtacgagtggatgaccctgagaagcaggcgtgcattgacttgattaaagagtacctgatgattcagaagcgaatcggtcaggcggcagaaggtgacaaggcgtggttacgttatgttcaagatgatggtaagattcacggagccgttaaccctaacggtgcagttactggtcgtgctactcatagtttcccaaaccttgcacagatacccggtgttcgttctccttacggggagcagtgtcgtagtgcttttggtgctgaacatcatttggatgggattactggcaagccgtgggtgcaagcggggatagacgccagtggcttagagttgcgctgtctggcacacttcatggctcgcttcgacaacggagagtatgcgaatgagattctcaacggtgacattcacaccaagaaccagaacgctgcggaactcccgacacgcgacaacgccaagactttcatttacgggttcctttacggagcaggagatgagaagattggtcagattgttggggcagggaaggagcgcgggaaggaactcaagaagaaattcttagagaacaccccggcgattgcagcattgcgagaagctatccaacagtctctcgttaagtcttccgcttggattggcggtgagcagaaagtccagtggaaacgccgttggattaaaggtctggatggtcgcaaggttcacgtcaggtctccacatgcagcgctcaacacattgttgcagtctgctggtgctctgatttgtaagctgtggattattaagaccgaagagatgctcattgagaaaggcttgaagcatggctgggatggtgactttgcgtacatggcttgggttcacgatgagattcaggtggcctgccgtaccgagcacatcgctcagattgttattgacaccgcgcaggaagctatgcgttgggtcggagagcattgggctttccgttgtcgtttagataccgaaggtaagatggggccaaattgggccgtctgccactaacagtaggagaaacattatggcaatgaccaaacactttaaagtaaccttcgacgttactgctgtgattgacagtgaatccgagaagaatctgaacgagttgctggtagacctagctaagaaggccgggtctggcgagaagctgaatccgttcaaacaagaactgcttattcaaggtctgacacacgggccggaaggtgcggctgcgttctgcatcaagcaaggtctccgtgagtttatccgcgatggtcacagtgagttaagctctaccgagcagaagcggatgaaattctcacctgcaactgtgcgggaggtgttcaaatgagtgaatacctgaaagtgcttgcagctatcaagggttgccctaagtcctttcagtcgaactatgtgcgaaacaatgcggctctcgtagctgaggccgcgtctcgtggacacattagctgtttgactgttggtggtcgtaatggtggagcgtgggaggtcacatccgctggtgtgcgcttcctgaaacgaatgggaggttgtgtatgattatgccaaagagtgacaccgtaacgatgactcgtgatgcgtggaatgatgttagcgcgtacattgataagctggagaaagacctagagttcctgaatgctcttaaggcgtgtggtgtggataattgggacggatactctgatgcaatcgagatggtttacggggaggaagacctatgagtttgattaccctcaaagacttcgctgagatgcgtgaaggtaaaccgatggagaagggcgtgctggtcatggatggtgactggctggtgtatcagtcgatggctgctgccgaagttgagacggattggggcgatgacatttggactctggagtgtgaccacgctaaggcgcggagcattctggattctgcaatcgaatcgtaccgaacccgtaagaaagcatggcgtgacgctacggttgtgctggcgtttaccgacgatgtgaactggcgcaaggaacttgtagacccgacttacaaggagaaccgcaaggcgacccgtaaacctgtgggctaccgtgacttccttcaagctctgtgggagcgcgatgagttcattcacatcaaagaggacatgcttgaaggtgatgacgttatgggcatcattgggtctggtcacgaggtcttcggcttcaagaaggctgtgttggtctcctgtgataaggacttcaagactatcccggacgttgacttcctgtggtgtaccactggtaacatcttgacgcagaccaaagagaccgctgattggtggcatctcttccagaccatcaagggtgatatgactgatggctactccgggattcccggctggggcgatacggcagaaggtttcctgaatgacccgttcattgtggagcctgtagagtccgtgttgaagtccggtaagaacaaggggcagacagtaaccaagtgggtgaagcgtgctcctgatgcgactgagacgttgtgggactgcattaaatccattggtgccaaagctgggatgaccgagcaggaaatcatcaagcagggccagatggctcgcattcttcgcttcgaggaatacaattacattgacaaggagatttacctatggacgccgcgaagctgattaccgtcgctgtgctggtaggtatgctggcgcgaggtctctggatgctcgctctcatagtccgagacgtgaagcgagactccgagattaagtgataaactcaaggctctctgtattaaccctcactaaagggaagagggagcctttatgattattactttaagacttaaccttaagaggtgaaattatgttacaaccaattaatcatgttttaactcatcccgatgatattcctagtatgcctcgtgcagctaaagagtatctacaggtgcgcttcaatcagacctatgtgatggagtccggggagtaccgtgcgctacgcgctgctggatactctgagtctttcattgctggtgtgatgcatggtctgtaccttgcctctcgaacacttgatgagattgaggtgcgtaaagagcaactgagacaggagtaattatatgtgctggaaaccgaaggtgaaagtccccaagatggacactaaccagattcgcgctgctgaaccagcacctttgactgagccacctaaatctgtggtatggggaggcgatgatgatgaggacaccagcgtgtcttcctctgaggttccaaccacacagagcagcggtaagagcagtcttaaggtaaagctggatgacaacgcagccaagaacaagagtaaatcctccattcgctccaaggcgtttgggtaactgtgacataacataggggacacattatgggattcctcaagaaaatcaagaaagccgttaagaaagttgtgaaggaagttagcagaccagtcgagaaggcaggtaaggaagtcggtaaagccgttggcggtgcgctgggtgcaggtaagcaggagattatccaacaagaggctccagtaccagtagtgactgcgccacctccagcacagattgtagatgtacctgaacaggataaggctgagggtgaggatggggcacaaaccgagagcgcacgtaagaaggcccgcgctggcggtaagaaggcacttagcgtagcccgtagctccggcggtggcattaacatctaaggaggactgaatggctgattcaaaacgtacaggcttgggcgaagacggtgctaaagctacctatgaccgcctaacgaacgaccgtagagcctatgagactcgtgcggaaaactgtgcgcaatacaccattccgtccttgttcccgaaggagtccgataacgaatctaccgactacacgactccgtggcaggctgtaggtgcgcggggtcttaacaatctggcctctaagttaatgcttgcgttattcccgatgcagtcgtggatgaagctgaccattagcgaatatgaggcgaagcagcttgttggagaccctgatggactcgctaaggtggacgaaggtctgtctatggttgagcgtattatcatgaattatatcgaatccaacagctaccgtgtgacgctctttgagtgcctcaagcagttgatcgtggcaggtaatgcactgctttacttaccggaacccgaaggtagctacaatccgatgaagctgtaccgattgtcttcttatgttgtccaaagagacgcatacggcaatgtgttacagattgtcactcgtgaccagatagcctttggtgctctcccggaagacgttcggtctgcggtagagaaagctggtggtgagaagaagatggacgaaatggtcgatgtgtacacccatgtgtatctcgatgaagagtccggcgattacctcaagtacgaggaagtagaggacgttgagattgatggctccgatgccacatatccgactgacgctatgccctacattccggttcgcatggttcgcattgatggcgagtcttatggtcgctcctactgtgaagaatacttaggtgacttaaggtcgcttgagaatctccaagaggctatcgttaagatgagcatgattagtgctaaggtcatcggtctggtcaaccccgctggtattacacaaccgcgtcgattaaccaaggctcagactggcgacttcgttccgggtcgtcgagaagatattgacttcctgcaactggagaagcaagctgactttaccgtagcgaaagctgtgagtgaccagatagaagcacgcttatcgtatgcctttatgttgaactctgcggtacaacgcactggtgaacgtgtgaccgccgaagagattcgatacgttgcgtcagaactggaagatacgcttggtggcgtctattcgattctgtctcaagaactgcaattgcctctggttcgtgtgctcttgaagcaactccaagcaacctcgcagattcctgagctaccgaaagaagccgttgagcctactatcagtacaggtctggaagcaatcggtcgtggtcaagacctcgataagctggagcgctgtatctccgcttgggctgctctggcccctatgcagggagacccggacattaaccttgctgtcattaagctgcgcattgctaacgccattggtattgatacttctggtatcctactgacggacgagcagaagcaagcactgatgatgcaggatgcggcccaaacaggtatcgagaacgctgccgccgctggtggggctggtgttggtgctctagcgacctcaagtccagaagctatgcagggtgcagcagcacaggctggcctagacgccacctaataaccctcactaaagggagacctcatctttgaaatgagcgatgactaaaggttggagtcctttggtttccctttatctttaacaacttaggagatttaacaatggctgaatctaatgcagacgtttatgcgtccttcggtgtgaacaacgcggtaatgaccggaagcacacctactgaacacgaacagaatatgcttagtctcgatgttgctgcccgtgacggcgatgatgcaatcgtacttagcgaggaaccgagttcccataacgatgacccatatgcatccggtgtagacccgttcgctgatggtgaagacgatgagggccgcattcaggttcgtatcagtgaagatggtaatgaagccgagttcgacactggtagcgataacgctgaggtggagaccgaaggtgaagccgatgagtttgagccgctgggtgacactccagaagaactgagccaagttactgaacaattaggacagcacgaagaaggctttcaggcgatggtcgagcaggccgttgagcgtggactgagcgcagagtctgtgactcgcatctacgaagagtacgaagccgatggcatctctgagaaatcctacgcggaactcgaagctgctggctatagtcgtgcctttgtggactcctacatctccggtcaggaagcccttgtagaccagtacgtcaatcaggtagttgcctttgctggtggtaaggagcgctttagcgcaatccatacgcaccttgaagcaacaaacccggctgcggctgagtcccttgagactgccatgatgaaccgagacttggcgactgtcaaagcaattatcaatctggctggtgagagttacacgaagaaattcggtaagcctgccaaccgtagtgttaccaagcgtgctactccggttaaaccagtagctcgtcagaaagagggctttacgaatcaggctgagatgattaaagctatgagcgacccgcgctatcgtagcgattctgcctaccgccaaatggtagaacagaaggttatcgactccagtttctaattaaccctcactaaagggagagaccatagatgactacaatggttgaatcacctgagcacagaactttgtggtcactcccgtaggtgaaacattgagaaccaactcgattcaagtagtaaccaaacttttctttaaattaacataaggagattcaacatggctaacattcaaggcggacagcaaattggtactaatcagggtaagggtcagtccgcagcggacaaattggcgctgttcctgaaagtgttcggcggtgaagtcctgacggctttcgctcgcacctccgtgaccatgcctcgtcacatgctgcgctctattgcttctggtaagtccgcacagttccctgtgattggtcgcaccaaagctgcttacctgaaaccgggtgagaacctcgatgacaaacgtaaggatatcaaacacaccgagaaggtaatccacattgatggcctgctgactgcggacgttctgatttacgacattgaggacgcgatgaaccactacgacgttcgcgctgagtacaccgcacagttgggtgaatctctggcgatggcggctgacggtgccgtactggctgaactggctggtctggttaacctgcctgacgcctccaatgagaacatcgagggtctcggtaagcctaccgtactgactctggttaagccgacctctggcgacctgactgacccggttgagctgggtaaagcgattatcgctcagttgaccgttgctcgtgcggctctgaccaagaattacgttccggctgctgaccgtaccttctacaccactcctgataactactctgcgattctggctgccctgatgccgaacgctgcaaactatcaggcattgattgaccctgagcgcggtactatccgtaacgtgatgggcttcgaagtggttgaggttccgcacctgaccgctggtggcgctggtgatacccgtgaggatgccccggctgaccagaagcacgctttcccggcgacttccagcactaccgttaaggttgctctggataacgttgtgggcctgttccagcaccgctctgcggttggtacggtcaaactgaaagacttggctctggagcgcgctcgtcgtgcgaactatcaggctgaccagattatcgctaagtacgcgatgggtcacggcggtctgcgtccagaagctgctggcgctatcgttctcccaaaggtgtcggagtaattcccgaccccactggagttactcttagtcagaagactatgagcttagacgttggggcttctaaagccctgacttctacggtaactccggctgatgcagtacagacagtgacctttacgtcttccaatgcgaagattgccacggtcgatgcctctggtactgtaactgctgtgggcgctggctccgctgacatcactgcgactactgtgaatggcctgacggctgtctgcaaggtcactgtgaaagcagtatagcctcccgtagaaggctaaggtctttaccggggatttactttccttcattactttatgaaccccttgggtgccctctgagggtatctgaggggttttttgctttaaaccctcactaacaggaggtaacatcatgcgctcttatgagatgaacattgagaccgcaggagagctatcagccgtcaacgacattctggcttccatcggtgagccaccagtatcaacccttgagggtgatgcgaatgctgacgttgcgaatgctcgacgtgtactcaataagattaaccgacagattcaatcacgaggatggacattcaatattgaggaaggtgtgactcttctaccggatgcgttctctggcatgataccgtttagctctgactatctgtccgtaatggcaacaagcggtcagacccaatatatcaaccgtggtggctatctctatgaccgctctgcgaagaccgacagattcccttctggtgtgcaggtaaacctgattcgtctgagagagttcgatgagatgcctgagtgcttccgaaactatatcgtcaccaaggcttcccgccagtttaacaaccgcttcttcggtgcgccggaggtagacggagtgttgcaggaagaggaacaggaagcgtggcgtgcgtgcttcgagtacgaactagactacggcaactacaacatgctggatggtgacgcattcacctctggtctacttaaccgctaataacaaggaggctctatggctctcattagtcaatcaatcaagaacctcaagggtggtatcagccaacagccagatattctccggttcgctgaacaaggtagcgtacagattaacggttggtcttctgagtcagagggtctccagaagcgcccaccgatgattcaccttaagacccttggcgctgctgggtatgtgggtgcgcaaccttacgtgcatcttatcaaccgtgatgagttcgagcagtatttcgtggtgttcactggtgaagacattaaggtgttcgacctcgatggtaaggagtaccaagtacgtggagaccgctcatatgttcgtacagctaacccacgagaagaccttaggatggtaactgtggctgattatacctttgtgactaaccgcaaggtggttgtgcagagtaacgaccaatcggtcaaccttccgggctttaaagaccaaggcgatgcactgattaatgttcgtggcggacaatatgggcgtagattatcaatcgagttcaacggggttgagcgtgctgctgtgcaactaccagatggttcacaaccagcacacgttaacgaggtggatggtcaggctatcgctgagaagctggcggtgcagttgcggaataacctagggaacccaaacaatgagcaagacccaaataagtggcggttcaatgttggccccggattcatccatatccttgcgcctaataacgataacgtttggggactacagactaaggatggttacgcagaccagctaatcaaccctgtaacccattacactcagtcgttccagaagttgccgattaatgctccagatgggtacatcgtgaagattgttggtgatacctcaaagactgccgaccagtattacgttaggttcgacctcaaccgtaaggtatgggtagaaacaattggctggaacacaaggactcacctacattaccacacgatgccttgggcgctggtacgtgcttctgatgggaactttgacttcaagtaccttgagtggggtgctcgtactgtgggggacgatacaaccaacccatacccatcctttaccggacagacaatcaatgatattttcttcttccgtaaccgtttaggattccttagtggggagaacatcatcttgtctcgcacctcgaaatacttcaacttcttcccggcctccgtgtcaaactactccgacgatgacccaatcgacgttgctgttagccacaaccgggtgtcaaccttgaagtatgccgttccgttctccgaagagttgctcctgtggtctgaccaagcgcagttcgttctgacagcctctggtatcctttcgagtcgctccgtagagttgaaccttacgactcagttcgacgtacaagacagggcacgcccacatggtgtaggacgtaatgtatactttgcgtcacctcgcgcttccttcacatccattaaccgatactatgcggtacaggatgtaagctctgtgaagaacgcagaggacatgacggctcacgttccgaactacatacctaatggggtatttagtatctcaggcacaactgctgagaacttcgtggctatccttacgagcggtgcgccgaaccgagtgtatatctataagttcctctacattgacgaggaaatcaggcagcagtcatggtctcattgggactttggggacaacgttacggtgtttgcagcacatgtgataaactcaacaatgactgtattgatgggcaatgaacatgctgtgtggatgggacgcttgcacttcacgaagaactccatagacattccgggagagccttacagattatacatcgacgctaagaggaaatacaccatccctgccgggacgtataatgatgatacctaccagacgtccataagcctcgcaacgatttatgggatgaacttcaccaagggtatggtttcggtggtctttcctgatgggaagattgtagagatagacccgccaatcaacgggtggagtagcgacccaatattgagactcgatggaaaccaagagggccaagtggtttacattgggttcaacatcccgttcacttatacgttctcgaagttcctcattaagaagactgctgaggatggctcgacggctaccgaggatattggtcgcttacagcttcggcgtgcgtgggtaaactatgaggattctggcgcgttcaccatccgtgtgaacaacctgtcccgtgagttcatctacacaatggctggcgctcgcttgggttctgacaatctgcgtgttggcaggtcgaacattggcacagggcagtaccgcttcccggttgttggaaacgctcagacgaacatagtaaccatcgagtcagatgcgtcaacaccactgaacatcattgggtgcggctgggaggggaactaccttcgtcgttcttctggcatttaacttaaagtctccctgcggtgaattaaccctcactaaagggagacactaatagatacgaggggttaaagcattatgtacattacaaagtgtttacaaatccatgccgacaactttcagccgtccatagaggacattctggaagctgaggcactaggtgttgaaccaaaggtaattcctgatgagaacactgtggcaatgcttagcgataacgctgtgttggcaattggtggtaatcagggagaccgagtgtggttccttacctctaagtacgtcccactgtttaccttgaaggagcgcttagagtttcgtagacttatcattgaatatcgtgatatgatgctgagccagtatgagtccatttggaatttcgtttgggtaggcaataagtcacacattcgtttcctaaagaccataggtgcggtattccataatgagtttaccgctgatggtcaatttcaattattcactatcagtaggaggtaactatgtgctggatggcagcgattcctatcgccatgatgggtgcccaagctctgagtagccagaacagtgctgacaaggcacgagtggcacagacagaagctggacgccgacaggcaatggagatggtcaaagagacgaatatccagaatgccaacgcctcattggaacaacgagacgcccttgaagctgcatcctctgagttgactacacgtaacatgcagaaggtacaggctatgggaacaatccgtgcagctatcggcgagagtatgctagaaggcgaatcaatgaagcgcatcaagcgtatcgaagagggcaactacattcgggaggcaaatagtgtcaccgagaattaccgccgagactacgctagtatctttgcgcaacagttgggacgcactcagtccacagcaagtcaagtcgatgcaatgtacaagagcgaggccaaaggtaagtccggcctgatgcgtgtactagaccctctgtccattatgggtcaggaagctgcaagtcaatatgcggctggtggatttgacaagaaaggtggaaaccaagcagcacctatcagtgccgccaaaggaaccaagaccgggaggtaataatggctagtaaactaaatagtgttttaggcaacatggcgactcccggtatggaacgactccggggcgtcaaaggtatggactaccgggcagcaaccattcaggctgaacaaccaagagcgagtcttctggactccattggtcgattcgctaaggctggtgccgatatgtacatggcgaaagatgaacgtgataagcaacgagccgatgagcgctccaacgagattatccgtaagctgacccctgagcagcgccgacaggctatccagaatggtacactgctgtatcaggatgacccatacgcaatgcaagccttgaagttcaagaccgggcgtaacgctgcgttcctcgttgacgatgaggttcaacaggccatcaaagagggtcgcttccgtactcgtgaagagatggagcagtatcgtcactcacgcctacaggagcactcgaagtcgttcgctgagcagttcggcatcaatgagatggacgaggaatacctgaagggtttcaacgcgaatatcaccgagcgtaacattgctctgtatggggcacatgataccttcctgagtgaccaagcgcagaagggtgcaatcctgaactcgaaggttgaactcaatggtgtcctgtctgaccctgacctactgtctcgtcctgagtccggtgagttcttccagaactacatcgacaactccttggtgacagggatgaccgacaatcaggctcaacaggttatctcttcgtccctgaatgacgtgctacagcgtccgggtggtgccgccttcttgcagaacattgagaaccgcaaggtaactctaaatggcgctacgactacctatcgtgaactgatgggtgatgaacagtggcaggccatgatgattaaggcacagcacactcaattccagaacaacgcgaagttaacagagaagttccgactggatattaactcagcgcttaaccaagcggacactggtaaaggttgggagactcttcaaggtatcaaggccgaactcgataagattcagccgggtgaagagatgactcctgagcgtgagtggttgatttccgcacaggaacagatgcgcacccgcttcaagcaggaacaagctgagacagccaagctgatggacaagcaacagaagaccctgaataaatctttggtcatcgacaagcagttccagaagcgcctcaacggtgaatacgtctcgaccaactataaggacatgccgaccaacgagaacactggtgagtttacacatagtgatatggtcaactacgcgaaccagaagttagcggaaatcgaggcgatggacttaacgcctgaacagaaagacaaactgaaattggactacctacgggcagactccaaggagggtgctttccgtgcagcgtttggtgagatgattactgatgctggaaacgaatggcaggctgcggtgattaacggcaagatgcctgagagcacaccagcgatggacaaccttcgtcgcatccgcaacactgaccctgacctgattgcctctctgtatcctgacaaggccgagttgttcctgacgatggacatgttggataaccaaggcatcgacacgcaggttcttatcgacgctgataaggcccgcgcacagaagaccaaggagatgcagtttgaggatgaccgagcgtgggccgctatgatgaacgattcaacgaatcctcaaatcaagtacatgccttcgagtgtccaagggtatgccaggaagatttatgattccgtgaagtaccggacagggaaccctgacatggcaaccgaacaggtcgcaaagttcctctccgattcgacgaccacgttctccagtagcgatgttgagggtgatacctacggcgtcctaccgaagaacatcctgactgtttcggatgaccctaagtcgtgggagcaagggaagaacattctggacgaagccattaagggaatcacagcggcgaacccttggattaccaacaagcaactgtcggtgtaccagcaaggtgattcaatctacctgatggacacaaccggacaggttcgcattcggtatgaccaagagttactccagcgtgagtaccagcgtaccgcacagatgcaagctgaggcagcacgagagaaagccctcaaagaggccaacaagcgtgccccaataagccgtgcaacacaggcgcgtgaagaagcgcgtaaacgtgtccaagataaacggaagaagactccgaagtatatctatggacgtaaagaagactaacagtgataaggaggctccatgagctacgataagaacaaacctagcgagttcgatgggttatttcaaaaagcggcagacaatcatggggtctcctatgacctgcttcgtaaattagcattcaacgaatccagctttaatccaaaggccaaatccccaacaggcccgaagggtctcatgcagttcaccaaaggtacagccactgcgcttggcctcaaggttactgacgctgatgacgatgaccgttacaaccctgagttggctgtggatgcagccgctcgtcacctgagtgacctcattcggaagtacgatggggatgaactcaaagctgccttggcgtataatcagggcgaggggcgcaacggtgctccacagatacaggcttatgacaaaggcgattgggcttcaatctctgaggaaggtcgtgactacatgcgtaacctgatggatgtagccaacagtcctcgcaagggggacttggaggcgttcggcggtatcaccccaaaggctaagggcattccatcgggggatgcatttgctggaatcgggaagaagcagacggtaggcactgacctgccggagtccactggattcaaagtggagggtaaagagcagcaagcgcctaacgtgccttatgctaaggacttttgggaaaagactggaacaacactggacgagtttaattctcgttcaaccttcttcggaatcggagatgccacaagtgcagaacttcacaactccgtattgggtgtggcttttcgtgccgctcgtagtgatgacggttttgatttattcaaggacaccattacgccgactcgctggaacagccatacgtggactccagaagagttagagcgtatccgtaaggaggtgaagaacccatcgtacatcaatgtagtcactggaggctctcctgagaatctggacgccctcattaagatggcgaatgacaactacgagatggacgcgcggtctgccgatgcgggtgttggtgccaaacttactgctggtatcgtcggtgctggtgtagacccgctgagttacgtgccgctagtgggtgtagccgggaagggtctcaaggtggctaacaaggctttcattgtcggtactcaaagtgctggcctagctgttgcctctgagggtatccgcacatcaatagctggtggtgaagcacactacgctgatgctgctttaggtggtctcatgttcggtgccggtatgagtgcaatcagtgacgctatcgctgctggtattcgccgttcccgtgggactgaggtcgttaatgacttcgctcctatggcacaccgcttggaagcccgcgagaccgctctgaactctggtggcgaagacctgacccgtatgcctagcgataaccatgtgttcgaccgtgagcacgctggcgttgagtattcacctctggagaccgagccgggtgcagttgtgttgcctcaaggtcaaatcctgagcgacaccaacccactcaaccctcagactcttagcgagttcgaggcggtcaaccctgagcgtgccgctcgtggtatctctttgggtggtttcactgagattggcttgaagactctccgctctgagaacccgactgttcgctccattgcgagtgaccttgtgcgctctccgactggtatggagtccgggacttctggtaagttcggtgcgacagcttctgacattaaggagcgactccacgcgaacaaccagcgcacctacaatcagctttatgatgctgtgcgtactgcaatgaaagaccctgagttctccaccggtggttccaagatgagccgtaaggaaatccgacaggaaatctacaagcgtgcagccttagcgattgagcggcctgagcttcaagcaaatctgacaaagggtgagcggaatgtgatgaacatcctcaagcagcactttgacctcaaacgcgaaatcatggagaacccgtcaatcttcggcaacaccaaggcggtcagtatcttccccggctcacgccacaagggaacctacgtgccaaacgtgtacgaccgcgctataaagattgagatggttaaacgttacggtaatgatggcttgcagcgagcaatcgcggagtcatggttgacgtcttatcgtgctcgtccagaagtcaaggcgagggtcgatgagtacctgatggaacttaacggtctcaaatccgtgcaggaagttacgcctgagatggtgcagaagcacgcgatggataaggcgtatggtatttcacacaccgaccagttctctgcctcctctgtcattgaggataacattgagggtctggtgggtatcgagaacaacaacttcttggaagcccgtaacatgttcgacagtgacatggcggtgactctccctgatggtaacacgttctctgtgaacgacctgcgtacatatgacatggctgaaattctgcctgcatacgaccgacgagtagatggtgatgttgcaatcatgggtggttccggtaagactaccaaagacctgaaagatgaaatcatggcgctggataagcagtcagagggcaacggcacactgaaaggtgaagtggaagccctcaaggataccgtgaagattctaactggtcgtgctcgaaggaacccggaaggcgcttggggcacagccctacgctccgtcaatgaccttacgttcttcgctaagaacgcctacatgggtgcgcagaacatcactgaaatcgctggtatgctggctaaaggtaacgtctctgcgataactcatggcatccctatgattaacgattgggtcaaccgtggtaaaccgcttcgtgcctctgagattaaggagctacacgggatggtgttcggtaaggaactcgaccaactaatccgtccgggacgtgaagaccacgtgcgccgactccgggagtctacggacaccagcgctgcggttgccaatgtggtcggtacgattcgtttcggtactcaagagttggctgcacgctccccttggacaatgctcctaaacggaacatcaaactacattcttgatgctgcccgtcagggtgtgcttggggatgtggctggagcggcccttgctgggaaagcctctaagttcggtaaggcaaactaccttaagtctgcctctatcagccctgagcagtggaatggaatcaagcagttgttcagagactatgcgactcgtggggaagacggtaagttcaccattcgtgacaaacaggctttcgctaacgacccacgctcaatggacttgtggcgtctggctgacaaggtggctgatgagactatactgcgccctcacaaggtttcctcacaggacgccaaagcgttcggtgctggggtcaagatggtgatgcagtttaagaacttcgtcattaagtcactgaactcccggttcgtccgcagcttctatgaggccacgaagaacaaccgagcgttagaccaagcgctgacccacatcgtctctttgggtctagctggtggttactacgttgcgcaggcgcaccttaaggcctcaagtctacaggagcacaaacgtaaggagtaccttaagaacgcccttgaccctaagatgattgctcatgcgtcaatctctcgtagttcacacttaggctcaccattgagtatctacgacatgttcgctgggatggttggtagcgatacctataagtacacacgctctactgtactacctaaagagtccgagaagcgcgaccctaccaaggcagtgacaggtagacaggtggcttcaactatcgcaggtgcagttggtgagcaggttccgggtttaggttttgtgggttctgtgggcgcaacagcaattaacgccgcttccctgctatcttctccaaacaaggctaccgctctggagttccgtacaggactcttcaacacctctcgtgagttgattcctaatgacccgctatcgcagcaactcattatgaaaatctacgaggccaacggtatccgcataaaggagacgccgaagaaacaataaaccctcactaaagggagagaggtcacattctggcctcttctctcttaatgctaatttacaaaggaggtcacatggctacaactattaagaccgtgatgacttacccgctggatggctccactacggacttcaatattccgtttgagtatctggcgcgtaagttcgtcagagtgacccttatcggtgttgaccgaaaggaactcatcttgaatcaagactatcgttttgcgactaagaccacaatctccacaacgagagcgttggggccagcggacggttataacatgattgaaatccgtcgattcacctccgctaccgataggctggttgactttacggatggctcaatcctacgtgcgtatgacctgaacatctcgcaggtacagaccctccacgttgctgaggaagcgcgtgaccttaccgctgatacgattggcgttaacaacgatggtgacttggatgctcgtggtcgtcgtatcgtgaacgttgcggacgctaaagaccccggtgatgcaataactttaggtcaagtctctcgatggaatgagtctgcgctgaactctgcgaaggctgctgctgcatctcaacaggccgctgctgcatctcaacaggccgctaagtcctcagagaacaactcgaaggtatctgaggacaacgcaaagacctccgagaacaacgcgcatcaatgggcgcagcgtacagaggactctccggttcagggtagcgagttctctgcgtatcactactcacggaaggcctccaagagtgccgccgccgcaagtacgtctgaggggaatgcaaagacctctgagaccaacgctaagacctctgagaccaacgctaagacctctgagactaacgctgcatcgagtgctgctaaggcttctgaggaggctgctaagctgactaacatgaatgactttgctgcttctattgattcagtcaacggtaacaatgttgtcatgaagggtgacttaaccattaaaggaaacggtaaagtatcaatactgaaccacagtgggctataccaagataagaccgtgaatggcgtgaactatgccaacaggatttatatggatgatgctgggggcatgcactttgagaactaccgtgtgtctggtacttcagtcaccttacgtgctggttttgttattacagataccaacaggtttgactttacagggccaacgcgagttaagggtgatatcaccgcatatgtggatgcgccacctaatccagccatcggtcaatacctcaattctgtggcagttcgctcacagcttcggggccgtggtgctaagaatgatccacttggtgcgtactgtggtatgtatattcaggagcacgttggtacagaccacgcgataatccttaacctcaatggttatagcaaggatactaactggcagctattctccaatggtaaaatatctacaccacttggtgatgtgatgacctcaggttctgatgttagaatcaaggatgatatcactaaacctcttgatggtgctggtgagcgtattgacgcaattggcatagtggaatacacagagattaccaccggggaacgtaaacgtgggtggctggcccaacagcttgacacgattgacccgctgtacacatacctcacgaccaccgcagaaggtagtcttttgaataccaacgacagggcgttgcttgctgacgtaatcactgagattcaggcactgcgtcaacgcgttaaagaactcgaaggacaatcaacaaagccagaggacggcacaacataaggagaacaagaatgttatcttttgacttcaataacgaggtcgttaaggctgcgcctattgttggcacaggggtcgctgatggggcggcccgactcttttggggactatcgttaaacgagtggttctacgttgcagctatcgcctacacagtggttcagattggtgccaaggtagtcgataagatgattgactggaaacgtgcaaataaggagtaacccatgagcgacaagactttaatcaagctgctggagatgctggacacggagatggcacagcgtatgcttgctgacctccagagcgaggagcgccgaacgccgcagctttacaacgcaatcggcaaactgttagaccgccataagttccaaatcagtaagctgaccccggatgagaacatccttggtggtctcgcggctggtctggaagactacaacaaagtggtcggccctaatggtctgactgacgatgagactatcacgctacagtaagtgacatactcaaggttctccacgtggggagcctttatggatgttatttggtgcatctacgtgaagtctaaaattgatgggaggtgttatgctaaaacttttacgcagcgcactcccttgggtactcgccgggacactctttatgggtggctggcacttagggtcaacccatgagagagcaaactggaaggaggtaatccaaaatgaatacattgcgaaaacaaaagcaaccgcagcaactcaggcagaggtcagtcgggtatcccgtgagtaccaagaagagattgcagccattgagggcagcactgataggatgcttaatgacctgcgtagtaataataagcggctgtcagtccgcatcaagacccttaccggactaccagaagataacggtagatgcgagtttaatggtcgagccgaactacacgagtcagatgctaagcgtattatcggaataacccaagctgctgatgctcacgtaagagcgctccagcgtactattaaggagatgcagaatgagcgacacccaagcaaaccgtaatgcgctaatcattgcgcagcttaagggtgacttcgtggccttcctgttcgtattgtggaaggctttggctctcccgccgccgactaagtgtcagatagatatggcccggtgtctggctaacggagacaacaagaagtttatcctacaggctttccgtggtattggtaagtcattcatcacctgtgcgttcgttgtgtggacgttatggcgtgaccctcagttgaagatactaattgtctctgcatccaaagaacgtgcggacgctaactccatcttcatcaagaacatcattgacctgctgcccttcttggctgagctaaagcctcgccccggtcagcgtgactctgtgattagtttcgatgttggccctgccaagcctgaccactctccgtctgtgaagtcggtgggtatcactggtcagttgactggtagccgtgctgatatcatcatagcggatgacgttgagattccgtctaactccgcaactcaaggtgcccgtgagaagctgtggactctggtgcaggaatttgctgcgcttctgaaaccgctgccgacttctcgcgttatctaccttggcacgcctcaaaccgaaatgaccttgtacaaggaactcgaagataaccgtgggtacaccacaatcatctggcctgcgctctatccgcgtagccgtgaggaagacttgtactatggcgaccgtctggccccgatgctccgcgaagagttcaacgatgggttcgagatgctccaaggtcaaccgactgaccccgtgcgcttcgatatggaagacctccgggagcgtgagttggaatatggtaaggctggcttcactttgcagttcatgctcaacccgaacctgagtgatgccgagaagtaccccttacgcctccgtgacgctatcgtgtgcggtctggacttcgagaaagccccaatgcattaccagtggcttccgaaccgtcagaatcgcaatgaagagcttcctaacgtgggccttaagggtgatgatattcatagctatcattcgtgcagccagaacactggacagtaccagcaacgcatcctcgtgattgacccaagtggtcgcggtaaggatgagacaggttacgcagtgttgttcaccctgaatggctacatctatctgatggaagctggcgggttccgcgatggttattccgataagacccttgagtccctcgctaagaaagcgaagcagtggaaggttcagacagtggtcttcgagagtaacttcggggatggtatgtttggtaaggtattcagccctgtgctcctgaaacaccatgcagcgcaacttgaagagattcgtgctcgtggtatgaaggaactacgcatttgtgatacgctggagcctgtactctctacgcaccgccttgtgattcgtgacgaggtgattcgtgaggactaccagactgcccgtgacgctgatggcaagcatgatgttcgctattcgctgttctaccagttgacccgtatggcccgtgagaagggcgctgtggcccatgacgaccgacttgatgcattagcattgggtgtggagttcttacgctctacgatggaactggacgccgtgaaggtggaagctgaggtgcttgaggcgttcttagaggaacacatggagcacccaatccattcggctggtcatgtagttacctctatggttgacggtatggaactctattgggaggatgacgatgtgaatagcaacaggttcattgactggtagttatgcatattgagtgcataaggaatcattgagaccacggatggtcactttaagaaattccttaagaatcaatgagtttgaattaaccctcactaaagggagagaggggacttaaagctactatataggttagtcattcaggttatgcaatgaccctttatgcactttaagtctcctctatgattggtgatattatcattgtataatcaccctaccttagagcaactgaaaggaggtggctcaatgttacgcttgctgattgccctgctgcgtcatagagtcacttggcgatttcttctggtacttactgctgcccttgggtacgcaggtcttaatgaccacctcggtcaactggaagtggccttttgctctatactctcttgtggggattaaattattgttgatgaacgacaagcggctctgagggattcgtaggtatagtttcactacaccaactcatccctgtagagtcaaccctaaaggttatacctaaagatgccctgtagttcgtaatggtcttacagggtcttctggtgtctcctagctatcccttcgggatgcgcctatggtctcacctatggtgtggccttacctaaagtgggttcctaaagagaccctttaagaatttactacaaaaatctgaatgggtatctcacagttcaagaacccaaagtaccccccatagccctcttaaagccacctaaagccagccctacccctagggtttaaccttcggttaaccttgagtgtagcgataactcactacggtatctactcgagtggcctataggatagcctaaagtgttgcctaaagtcaatatctaaagtggtggatggcttaatgagggcttaaagagtgtcctagtgtaccagttcaatagtacatctctatgtgtccctatctgttagcctcctaaagtaaaccctaaagccatcacctaaagccatcacctaaagagcgccgctatcttaaagacaaccagaccgatagacccactgttagcctgtagtgatgccttgtagttgcctatggtgtctatcgtcaattcaattaccctcactaaagggaataagggaataagggatacttaaaggggaattagggatttaataaaagattaaaattaatggttgactttaagtaacccttaaggctattattcatctcgtcaacgggacaacggccttaaagccactccctgagataccggagtcaaccggataagtagacagcctgataagtcatacgaaaaacaggcattgacaacatgaagtaaacgcagtaagatacacagcgtcaaccggacacaaggtgtcttctaggtgacttaagcgcaccacggcacataaagtgaaacaaaacggttgacaacatgaagtaaacacggtacgatgtaccacgaaatgacggaacagtgaggcgggacactgaaagccgctagggtctaacgaaaccagaccgacacgctctttaacaatctggataatagctcttgagtgtaccgatgtataagcgaataactcaaggtcgcactaaaagcgtggcctttatgatattcacttaacatgaactaacatgaggtaacaccaaatgattttcactaaagagcctgctaacgtcttctatgtactggtgtcagctttccgttccaacctcgacgatgaggtgaacatgagtcgccaccgccacatggtaagcactttacgtgccgcaccgggtctttatggctccgttgagtcaaccgatttgaccgggtgctatcgtgaggcaatcgcaagcgcaccgactgaggaaaaaacggttcgtgtacgctgcaaggacaaggcgcaggcactcaatgttgcacgcttagcttgtaatgagtgggagcaagattgcgtactggtatacaaatcacagactcacacggctggtctggtgtacgctaaaggtatcgacggttacaaggctgaacgtctgccgggtagcttccaagaagtgcctaaaggcgcaccactgcaaggctgctttacgattgacgagttcggtcgccgctggcaagtacgataagtgttaaactcaaggtcgcacgctgagtgtggcctttatgattaccactaaataaccctgagaggatatgactatgaaacaatacgccatccttattcccggctggtgctactcaatgacctgctacgggtacaacgaaagggacgctcgtgcccgattcagggatcaacaaggcttcggcaagcgtttacctaatggtacggctgtatgggaggttatgtaatgagtaagttactggcaacatccaaaatagcaggccagtgcaccgtaacactgcgtgagtattaccacgggtcaatgggaagcacctacgttgtgcggtatggtaaacaggtcacacattgggtaaacccgattttagcacaagaggattatcaagcctgtgtggtacaccaagcaacatgtgcgggctggaatgattgataacgcgctttgcaatcactggacaacaggcttcaagtctatcaggtggtaaactcaaggtcgctccatgcgagtggcctttatgattaacattacgatagaggatgagagtatgggatacgaagacacgaagaacctgataattctctgtatagcaatacccgctgcaatcaactttgtgtacgaggtatggattaagaaatgattatcgcactaatcgcactggtctatctatgcatcgcaatgtactttatgcgagactttaagcgcggtctggcaatacacaaggcaacgctgagttactttaagtggggattcatcccacggtttacggttcgtgaacgtaacggacgctttaaagccaacaaggtaggagtattctacattgctacgcactaactcaaagcacgtaaagattgcactgtatgcgatggcttatggtgcatcgaaacgcaaggtcaaacgcatcttaacgagacaccgcaagatgaccgcacgacaggctgcaagcgctgtcaaatgggctgaatttactctttactcttcttacagataacaggacactgaacgatgactttcaccgaagcacaagccgcactcgaagctatccgcaacctaccgattgagcgcctgaacgaacgccagccaatgctggtggctcttgcggctgctatcgtgaacgatgagactcaggacggcgaactgacgcaggcagcaggaaacacgtcgctcgaagatatggactactggcagacactggctgagcgtatgcgtgatgttggatttgtacgcttgggtaacggtcactttagcgcagcatatgagcacgcactgttaccgggcaaggtcatcaaggtaggctttaagaaagaggactcaggcgcagcctatgcagccttctgccgtatgaatcagggtcgggagggtatccctacggtgtacgacattcagcgtcatgcaggctgctacacggtggtcttggactatctgacaccgcttaacgattggtgctacggtgaaagcgataagattcgccaccacttccgcgctgcaagggaaatcattgaggaggattgcttcaataccgccgaagagtacccgataagtgacgggttcattgagacctgcaaggatatccgcaagttcttcctaggcattgcatcgttcgattgtcacagcggtaacatgatgaaagaccaaatgggccgcttgattatcacagacccggtatcgttcagcgcagacaacaagttaaagccgggtgagtttcactgtgacccggatgaactaatcgctgagattgaggcgctgagggcgcaggaagcgattgaccgctgtaaggcacgcaaggcacgccgtgaccctaaaggaacctttcaggtagcacgtaaagcccgtgcaaaatggcgcagaaaggcctctaagcgtgctaaacgtgacgctaaggtactcgctaagatgcgcatggacgccaatcagaatcgcagggatgagcctagggcgcgtatggtgtggggcgataagcactggcgcaacgcttgggtgcaccacaataacctaaactttgcagaactggagcgcctcgctgctgcggcaatgatgatgcacgacgaggtgcgcattcagtggggcaaaccgttacacatagacgcgtaccttgacaggagactgcaaggctgatagagtcttttcttacaggtcatcacgaggtggcctgaataggaacgatttattcacaacgaggtaagcaatgaacatcatcgaaactatcgaaaagaatgacttctccgaaatcgaactggctgctatcccgttcaacacactggcagaccactacggtagcgcactggctcgtgaacaactggctttagagcatgagtcttatgagctaggcgagcgccgcttcctcaagatgcttgagcgtcaagcgaaagctggtgagattgcagacaacgcagccgctaagccattactcgctacgcttctccctaagttaaccgcacgtatcgtagagtggctcgaagagtacgcatcgaagaaaggccgcaagcccgtagcctatgcaccgctccagttactcaagccggaagcctccgcgtttatcaccctgaaagttatccttgcgtcactgaccagcacgaacatgacaaccattcaggccgctgctggtatgctagggaaggccattgaggatgaggcacgtttcggtcgcatccgtgacctcgaagcgaagcacttcaagaagcacgttgaggaacagcttaacaagcgccacgggcaagtctacaagaaagcctttatgcaggtggtcgaggccgatatgattggtcgcggtctgcttggtggtgaggcgtggtctagctgggataaagaaaccacgatgcacgtagggattcgcctgattgaaatgctgattgaatccacgggtctggtggaattacagcgccacaacgcaggtaacgcaggctctgaccatgaggcactacaactggcccaagagtacgtggacgtattagcgaagcgtgcaggcgctctggcgggtatctctccgatgttccagccatgtgtcgtaccgccgaaaccttgggtagcaatcaccgggggcggctattgggctaacggtcgcagacctttggcactcgttcgcactcactctaagaagggcttgatgcgctacgaagacgtttacatgccagaagtctacaaggctgtgaacatcgcgcaaaacaccgcatggaaaatcaacaagaaagttcttacggttgtcaatgagattgttaactggaagaattgcccggtcgcagacattccatcgctggagcgccaagagttaccgcctaagccggacgacattgacaccaacgaggcagcactcaaggagtggaagaaagccgccgctggtatctaccgcttggacaaggcacgagtgtctcgccgtatcagcttagagttcatgctggagcaggccaacaagttcgcaagcaagaaagcaatatggttcccttacaacatggactggcgcggtcgtgtgtacgctgtgccgatgttcaacccacaaggcaacgacatgacgaaaggtctgttgaccctcgctaaaggcaagccaatcggtgaggaaggtttctactggctgaaaatccacggtgcgaactgtgcgggtgtcgataaggttcctttccctgagcgcatcgcgttcattgagaagcacgtagacgacattctggcttgcgctaaagacccaatcaataacacttggtgggccgagcaggattcacctttctgtttcctcgcgttctgcttcgagtatgcaggcgttgcgcaccacggtctgagctacaactgctctctgccgctggcgttcgacgggtcttgctctggtatccagcacttctccgcgatgctccgcgatgaggtaggtggtcgtgcggttaacctgctgccaagcgaaaccgtgcaggacatttacggcatcgttgcacagaaagtaaacgagattctcaaacaggatgcaatcaacggcacacctaacgagatgattaccgttaccgacaaggacaccggggaaatctcagagaagctcaagctgggaacctcaacgctggcgcaacagtggctggcatatggtgtaacccgtagcgtaactaaacgttcggtcatgacgctggcttacggctccaaggagttcggctttcgtcaacaggtactggacgacaccattcagcctgcgattgacagcggtaagggcttgatgttcacccaacctaaccaagcggctggttatatggctaagctgatttgggacgcggtgagcgtgaccgtagtcgcagcggttgaggcgatgaactggctcaagtctgccgctaagctgctggctgctgaggtcaaggacaagaagaccaaggagattctgcgccaccgttgcgcggttcactggactacgccggacggcttcccggtctggcaggaataccgcaagccactccagaagcgtcttgatatgattttcttagggcaattccgtctgcaaccgacgattaataccctcaaggattcaggcattgacgcacacaagcaggagtccggcatcgcacctaactttgttcactcacaggatggtagtcacctccgcatgacagtcgtttatgctcacgagaagtatggtattgagtcctttgcgctcatccatgacagctttggtactattccggcagacgctggtaagctctttaaggctgtgcgtgaaacgatggttatcacctatgagaacaacgatgtgctggcagacttctactctcagtttgcagaccagctacacgagacccaactggacaagatgccaccgcttccgaagaaaggaaacctgaacctgcaagacattctcaagtctgactttgcctttgcataacaagcacttagcattaaccctcactaacgggagactacttaaggtctccctctttaagacactttaggtactaagagattaaatttatgattaacattaagactttctttaagaacatctttaagttaaaccgcttgacttccgttaagttctacgcttggatgcccggtagtgatgacctccgcaagaccgaatttaagttaggcttagggccgtgcggtaaggtggtcacgaagttggaatgttactcaacgtcctccgggatggtcatcttccagaccactgaggacaacgaaacgaaatcattctactacccgaagggttcaacgtgtggtcgtatcgaacggacatacagttaaccctcactaacgggagagttaaacttaaggtcatcaccggcggtggcctttgtgattaactttcaatacacatcaacatgaggtaagatactatgcgtaccaactttgagaaatttaccaagcgcgattcagtggtcaacgagcatggcgaacagtggcaagagcgccgtgaccgcatgaagaaacgccacaagcaacagcgcggtaactcacagaaacgggagtggaactaatgatgggacgtatctatagcggcaacctgaacgattacaaagatgcggtagcgcgtctacaggaagaccatgacgtgaccgtgaaggtggagtcattcagctatgaaaacccagcgaagatgtgcaggtcatccggtgaggttctccgcgtgttcacacgctcagggcatccggtggcatccagaaccttcgagcatagcgacagcgatgtacaaatcaacgcgcagactgcatggctccgtaaggttcacagcgatttgaaacactggaagtaataaccctcactaaagggagaacgaaaggaggaaacattatgagaatttcatttgacttaatgagtccttcctttctctcatgggatacgggtcgtcacactggcggctctattcgcaacggctatagaagggttcgttatgaaggtaagtggttaaaccatcacatactcatttgggaacacttcaacggtgcagtcccggagggaatggaagtagaccacattgaccgtaacaaacttaacaacgcgcctagtaaccttagacttgtgacccgctctgagaacaacagaaatcggtcagtacaccggaacaacaagtcaggaatcaaaggtgtctactggcacaaacaccgccaagtttggtacggtcagtgtcgaagaggcaacaaaacatttatcaccgctggttgctccacgaaggaacaggcggcagaacttttagagaaactcaaagaggaaattaattatgatgattttcaaaaccgtcccgtataaggctgtgtcattcgtagagtctgccgttaagaaagcgctggagacctccggctacctgattgctgacattaagtacgatggtgtgcgcggtaacattgtggttgacaacgtggctgaggccgcatggctgtctcgcgtatccaagttcatcccggcgctggaacacctgaacggtttcgataagcgctggcagcaactactgaacgatgaccgctgcatcttcccggatggcttcatgctggatggcgaactgatggtcaaaggtgtagacttcaacaccgggtctggcctgctgcgtaccaagtggctcaagaagaacaacttcatgtttgaccgtggtggtgttgagccgctgaaaggttccaaagtagcctttgagttagaccccaagctactcagtgttcgcctgtatgcggtcatgccgattcacattgcggagtctggcgaggactacgatgtacagaacctgctgatgccgtatcatgtggaagccatgcgctctcttctggttgaatacttcccggaaatcgagtggcttatcgctgagacctacgaggtctacgatatggattcgctgactgaactgtacgaagagaagcgtgccgaaggtcacgagggtctcattgtgaaagacccgcagggcatctataagcgaggcaagaagtctggctggtggaagctcaagcctgagtgtgaagctgatggtatcattcagggtgtcaattggggaaccgaaggtttagccaacgagggcaaagtgattggctttagtgtgcttcttgagactggtcgtttagtagacgccaacaacatctctcgcgcactgatggacgagttcacagccaacgctaaggcacacggtgaagacttctacaatgggtgggcctgtcaggtcaactacatggaagagactccagatggctccctgcgtcaccctagcttcgagaagttccgaggcactgaggacaaccctcaagagaaaatgtaaccaactcactggctcaccttaacgggtgggcctttcttcgttcagcggtattaaccctcactaacaggagacacacacaccatgtggcttatcctattcgctatcgtcgcaacgctgggattaatggctgccgacgacaacatttggcctgattgttaaggagataacatcatgcgtttacatttcaacaaatccaacggtatcttttcggttcgccgtaaagaccgctcgaccgtattggcctctgagcgcaacgccaagctgccgctgattggttcggtcgccacgctatcaccttgtgttcacctgctgattactcgtggtgagttcgtcaaggcgatgaacaaagagcgtcctcatctggaagccgtggtcacttactggcctcgcattcgtctgttcgttaagtggattaaggaggtgctgtaatgctgcaacatcattggaacaaaccagacttagaggctcgcttcccggttaactctgtggtgcgatactccggcggtggcctcaagcgcatcttagggatgagcggagtggtaactggtcactcgcacacaggtcgcgtcaaggttcgcttcggtactcagcacgctgaggttctcccgaacaacctgattccgctaccgaaagctggcgttaagactccgaacgtggaagcaccgaagacagaagtcaagtctgatgttacccatccgaaccactacatgttgttcgacaacgtggaagccattgaggttatcgcccggtcaatgaccgtcgaggcgttccgtgggtactgcttagggaacatccttaagtatcgcctacgtgctggcaagaagtccgaactggcaactatggagaaagacctcaagaaagctgcattctatcaggaactctttgacaaacaccgggggctgtgttatgacgcttcgtgaatgttgcgattggtgtgccgctaagtggaaccaagctatcgaggatggtgacaaggcgtctgctgacgcttaccaacaactgtacgcgctgtgggagcggcgctttaaggaggccaataaatgagccaatgtaacaacgggtgcaagtatgcgaaggacgtagggatggagaaccactcctgcgcaaatcgctgcatgtactcagaacagaaataccttctgacaatggaaggtaacaccgagtcctttgagattccggtattcgcccggtctcttgaagaggcaacgctacaggctgaacattacgaggacgcagggttcgtagttactcgaatccgtccagaagtgaaagcctaattaccctcactaaagggaacaacccaaactatcaaccaaaggagaaatactatggctggtttcaagaagaaaatctacacatctggtcttggcactgctgagccttatgcttacctgagtaagccggattatggcaacgaagagcgtggcttcggcaaccctcgcggtatctataaggtagacctgactctttccaataaagacccgcgctgtcaggcgatggtcgatgaaatcgtgaagactcacgaagaggcttatgctgctgccgtggaagagttcgaagcta

SEQ ID NO: 30 - DNA, 178110 bp, Unknown
  source: /note="Description of Unknown: KP2W-M0102 Bacteriophage sequence"
aaaagacggtaaacttcggattgaaggtattttcctccaggccgaaaaagttaaccgcaataagcgactgtatccgaaaaaagtattagaagaagcagtaaacgattatatcagaactcaggttaatacccgtcaagctctgggtgaaatgaatcacccgccgcgaccgaatgtcgatccgcgtaatgcttgcatcctaattgaaaaattatggtggaaaggtaatgacgtttggggtcgcgctgttgttgtcgaaggtgataacggtgatggggataaactcgcggcgttaattcgcgcaggttgggttccaggtgtttcttctcgcggactgggtaaactttccgattctggaaaaggttacggtatcgtacaagaagggtttaaattggcggtaggcgttgatgttgtttgggggccaagtgctccagatgcttacgttaagccgattaccgaatctcagtcaagcaaaacgcttgttgagaataatagtgctgatgatgacgctttcagaaaactctctgaacgtttgaaaagtctatataaataatatcatatcaaacaggaaacttagaaatgcttaaagaacaactgttggcagaagcccagaacctggataccccagttgagttagacagcattttcgaatcagttgaactttctgatgatgcgaaagcaaacttcaccactgtattcgaacaagctgtaaaagcaggtgctgcgaaactcgctgaaacccacatcgcccagatcgcggaacgctccgatgaactggttgaagcccaggttgccgaaaaagctggcgaaatcgaaaataaactgtacgaagatgcgaataaatacttcgaccacatcgcgcaggaatggctctctgaaaacaaagaagctgtgtcccgtgatatcaaggccgatctgttcgaatctctggtaatgggaatgaaagaactgttcgttgaacacaacgtagttatcccagaagcgcaggttgatgttgttgcagaactcgaagatgaactgaccgagaatcagcaggaagttaaacgcctgttcgaagctaatcaggctcaggctaaagagatcgccaacatgaaacgcgataccatcgtttcagaaaaaacaaaagatctgactgaatcgcaaattgaaaaggttcagaacctgatcgaaggtttggaatattccgacaagttcgaatccaaactgaccgcaatcgttgaaatggtagcgactaaagcggaaaaacaggttgaagagagtaccactactcagacaaccactaaagatgactttgttccggtgaatgaaaatacacctccagcagagaaatcgaagatcaataaatatgtacaagcggctaaagccctttcctaatcttataaggtaagaaacaatgtctaagaaaaacgaattgatggaaaaatggaacgatcttctggaatctcaggaaggtttaccggatatcgctaccaaatccaaaaaacaactggttgcagcaattctggaaactcaggaaaaggatgctgatactgatccagtatatcgcgacgaaaaaatcattgaatccttcggcggtttcctggcggaagcagagatcgcgggtgaccacggttacgacgcaaccaacattgcctctggtaaatccagcggtgcaatcaccaacatcggccctgctgtaatcggtatggttcgccgtgcgattcctaacctgatcgcattcgacatttgcggtgttcagcctatgactggccctactggtcaggtgttcgcactccgtgctgtatacggtaaagatcctctggctggcggtactcctgcaaacgttcgtgaagcattccatccgatgttcgctccagacaccatgtattctggtgaaggtgcaaacaccgcgtttgctgctatcgcaactggtgttgctatcgcttccggcgctatcgttaagcacgtattccaggaaactggtgtcgcgtacttccagaacgtaacctccggcaacgtaaccgtaactggtgctgatgctgctgctctggatgctgctgtaatcgcagaaaacgagaaaggcactctggctgaaatttccgaaggtatggctaccagcgtagcagaactccaggaaaacttcaacggttccagcgctaacccgtggaacgaaatggctttccgtatcgacaaacaggttatcgaagctcgtagccgtcaactgaaagcacagtattccgttgaactggcacaggatcttcgtgctgtacacggtatggacgctgacgccgaactgtctgcaatcctggcaactgaaatcatgctggaaatcaaccgcgaaatcgttgacctgatcaactacaccgcgcagattggtaaaactggtttcacccagaccgtaggctctaaagctggtgcgtttgacttccaagatccagtagatattcgcggcgctcgttgggctggtgaaagctataaagctctgctgattcagatcgacaaagaagcgaacgaaatcgcgcgtcaaactggtcgtggtgctggtaacttcatcatcgcttcccgtaacgtggtttccgctctggctcgtatcgacagcggcatcactccggcaggtcagggtctccagaaaactctgaacgtagacaccactaaagcggtattcgctggtgtactgggtggcacttacaaagtgtacatcgaccagtacgctcgccaggattacttcaccgtgggctacaagggtgataacgaaatggatgctggtatctactacgctccatacgttgcgctgactccgctgcgtggttctgatcctaagaacttccagccagtaatgggcttcaaaactcgttacggtatcggcatcaacccgtttgcgaactctcgctctcaggctccggcagatcgtatcacctctggtatgatcagcaaagaaatgtgcggtaaaaacgcatacttccgtaaggtctgggttaaaggtctgtaatcgactttacactaaaaggcaacctacgggttgccttttttgttggtgtaaatagatacaggtaaaaagccctctaattcaggaaccaaagaaatgagtgataaacactacacaattcacaagttgatgcgtcagtcttcgcttccgtctggtaaacgagaaaaagttatcaacgaagcaacaggcacgaccgacatcaacgtacagaacacgcgcccagaactggtttctttgactcgcgcggttaacaacctgatctatcatgaactggttgctgtacaagaaacagaactccctgttgcaacactgttcggtgttcgctatcgcaaccctaacggtgatatgactttctccagtgctgcaacctattcaggccgaatctctggacgtacagacatcgacgaaatcgatctgactaaagcctacgttaaaggtgatttgttcaagcatgatggtactgacgttgtttatgaggttatcgaaccgattaccctgaacactctggataccgacaaagacaccgcgatcatgaaagctgtgttccaaagcaaaattcgactggttagcgaagccgctgatacttctaagtatgaaaccagcgaagatatcgcgtcaacctccttccagatggatcgctggaatattccggtacgctcgcgtaagtttaaaaccgaaatgacggttgaactgatgcaggatttggaagcgaaccagttcgaagctgatggggtgatcgaagacatcctgggaaccgtggcaagtgaagaagtcaacaaagacattattcaaacactgatcaccgtttccaaacgttacaacgttgatggactcgttacggatggtatttttgacggtactaccgcatacaccgcgaaggatgctccagcattgggtcgtatcctgtaccaattagcgtgtgaaatggggcaggaaatgaatagaacgacttcatttgatgctacctacgtcctcgcaacagcgcgtgttgtaggcattctggctgcgtctggttggatgcacgaaaccgacgaacaacacccactggcaacaggtaagctgaacaacggttattatgtctatacagacaccaacagcccgttcgattatatgctgactggttgcaaatatgatctgggtgatatggatcacgtaggctctctgttcttcgctccgtataccgaagctgatgaagcaggttcaatcaaagtatccgtagatccggcatccctgcaaccgaaagttgctattctgatgcgttacggtctttccgtgaacccatacacagcagaaagcgaatccgatcacctgatcaaaggtgatgattggtctgctcttgcaggtaaatctaagctgagtcagatcgtaggtattaagttacctaaactgggttaacaagttttgttttgagaagaccattatagtaataaagatctataaggtcaaacgagcgaagcgagttttcacgaacgaagtgagtgatgggtaagtacgatgtactgtttataatatttatattttatatatagagaaaacagtacatttccgtatactttttaaccaacattcactcactacgttcgttcatgtactcgcttcgctcgtagatttgacttcttgatctaactggttataatgttactttgttttgaggtgatacatggctgaactaaaacttgaagatctacaggctgaacttgaagaggatatgcgtattgatccgttgaagttacaaagcgaatcagcagacattccgaagatttggtcaaaatggcttcgataccattcgaatgctaagaaaaaacttattcaactccaggcgaagaaagaagcgattgtaaaagatcggttactgttctacactggtagacacgaaagcgaaatgaccgatgtcatttacactggttcgggtgaaatcaaaattgctatctccggtgatcctaagaccgttgaagttaacaagctgatccaatacttcgaactgattgcagagtttaccggaaaagcgctggatatcgttaagaacaaaggctactccatcaaaaacatgttggagatccgtaaacttgagagtggtgcataaaatggcagaagaatttgattgcaaatgcgttgtgtgcaaacaaccgatgaactcccgtaatacggcgtttgtcaatgaagctggcccgatctgcggtgtcgtatgtttgcaatatctcaacgaaaggaatgatcgcggtatcaatgaagccgacgatctgaacgaagttcaaatgttgctgtaggtgtgaatatgaaagactattcaaaaatcgactttaacgaagtatttcgtttgctgggattgatggaagaatgtgtgaccagggttcatgcacttcgaatttcgtttgaaagcggttgtatcgaagacgaacgcccagatttatagcagtaaatagatgtgtaccccttgtggggcttgggcttaccgtgtggcgtacccatttgcgccgtccgatagaatttactttcggtggggtgattggtaagataccttcgagtaaaggccagttaattgtaattcagaatagtacagcactgaaataaaataaatgtacgtgtcggaacaaacggtttccgaaattaaaaagccccttcctttcggttggggctttctttttaaaacttctcttcttctccggtttcaagttcggctttcagttcttctcgccgtcccttgatcgcgtcacgcattgaaatgtcatcggatgctgcaacctcgacttctttcacgcgggtgttgtaatacttttcaagttctttcaaaccttctagtgtccggcacgaagcaaccttattcatgaaatcatcaatcgctgcttcgtttacgaatgtagtaaaacttttcattttggcctcttaaatttctacctgtttgatcgcgtagtcgaatcgttcttcattgtagatccgcacacgttccatagcatgtttcataccgtagtttgtcgcactgtatttatttttggctgtcttagactttgacagcgtagccaggttatcaacgatatcccatacagtagcgagcgctttcgatccgtgcttacgaagtacacgaccgatagactgtttcaccacaacagcagatttgcaagggtgcgcaaaaatgatgtggtgtaggttcttgattgagatacccgtactcagtaccccgatcgaaccgatgacgattaaacctttcgtcgattccgcgattttcttcatttcgttacgatcgtcaatgtctgtatcaccattgaccaacaccacgttatcgtaaaccttgctcaactgctcgtacagccattttccgtgctctttgtaccggaacatcacaaaggcgttttcgttcttctcacgggctaatttgagcgctaattttagaatccacgcgttgcgccgtgtgtggctggttacgtacttgatttccgtctggtagtccgcacccttcaattttttgacctcttcttctttgtatcgaaggaagatcgtgttaattttcaggttggtgacttgtccatcatccatcaaacgacgcgtatcaactggtttaaagactttgccgaacgcaccgatgtattgcatcatgttcgttttcccttctttcagggaaccggataaacccagtttgaagatacattgatccatcgtgtcgataatctttttgatgctcatgcctgttgagaggtggcattcatcaaccatcaaacacatgaactgttggaaccattcggcaggcattttaaccgctgattgccaggtagaaacgtaaatcagtgcattactgtttttcgctgtaccggaacggatacccagcattgccgatttcgggaacaaacgatagtttgcgatgtcctcgatcatttggtcaacaagtgcggtagtcggaacgatgatcaacactttcccgctgtaatgttccagacaccaacgagagataagcccctgaatcagagatttacctgctgatgttggcaggttcagaacaccgcgacggtttttgataccgtggaacactgattcgcgttgataccagtacgggtcgatctgtttgtcgccgtcataaaccggatgttcgctaacccacttatcaaaatcttcttgcgtgatatcctctgtttcgtggatctttggatcaacccagattgaatacccgcgtgattctgcgaatttggataccagataggctaacccatacgggagtttcccgttgtagtccatcaagtaaatgtaaccgttccatccaccatatttgtatttggcctgatactgatagcctgggggctggaagctgaaatagtcacgcagttcatagacaatgtttggttctgcctgaatctgtacgtggcttgtgtttaaaaatttgacttcaatatccactatgattaccctatgtacaaagtatatacgtatttatgtcataaatattggataaacacttggagataccaatgaacattgattacgaaaaagttgatgggttccgtaccctcgacgcaaaagaacagaaaggcgcgttagctgattacgcaatgactgtgtttgctgttaagctgaacaaacaaaaatccttcgataacatgctggcggatctggttgctgctttaccggaagatgaagaaaaaccggaactgctgatcgattcccctgaaccggaaatcgttgcatataaaggtgaggtgactatgggtgaacctgtcatcgaagccccgaacgttcccgatgtggttattgatgcttctgcggattttatggagtacgttaaagaggtcgcgccggaagtagccgatcaaatccaattagtacctgatgtcgtagaagctcctgtaagcgcttctgacgagtccaaaggcgaactggtatggttggaagggtttagcccgacaatcttcatgatggggcgctctgcgagttctaacgggtattatacctgtccgtggtggatctatgactggattaaacaaaccccagactggtacaaagatcctgatagctgtccacatgcaagcgcaatcgacacaatcaaatcacttgcgttctatatcgtgcgcgatggtgaagttcgtgttcgcgaaaccagaaatagccgattcgaaacatttaagttttagcactttttgctaaaaaacttgttgacgcataccctcgtttaaagtatatttgtactcgaaggcgggggaatggctctcgcagtgaagaaggaaagcaaaatgaaaaacgaaatgatgaaaaacgcttattacccagttctgtttgtttgggctgatggtaaagtgaagaaagtagtcaattcaaatgctccttactatactgttgaagaagcactgcgccacgcttacgaagctgattatcctgtccctgctgaacctggttatgctcgttggaacggttcaaaatgggttgctgatacctgggacaactacgaagaagcaaaaatggaatgcgatcctgattatgtttctcgccaaatggaagcgcacatgattgcagaccgtcgcctggataacgaagctcgcggtttctattaaaattcaaagggggcgtagcccccttttttgtaggtaaaatatgactgaattaaatcacgaatgcctgaaagacttatcagaaggtaaagagatcggaaacgtcatcttccttgatatcgacggcgttctaaataatatgcggtgcatgaaatttggtgagcatatggacattgaatgtgctcgacacctgcgccggatcgtaaatcatgcgaactgtgatattgtcatttcctctacatggaggatcggcaacacaacccatactctacgggaaatcttctacccgtggggattgtatcgtatcattgggaaaacctgtacgaatctaacagaccgacaagcaggacgcggtgatgaaatcaaagcatggatcgacaccttcggatgtaagaattaccttatccttgatgacgataccgatatgctgccggaacagagtgaacatttcatcaataccgatgggttcgtagggctgacagaagaacaatccacttacgcgatccgtaatgtgttctgtgtaacaaacccgttctgtcctgaatgcaacggctatgggcgcgtgaaccaatatgataaatgtccgtcttgtgacggcaaaattttacttctctaaatagagaaaaactaagaggttttgaaaatggctacagaaaaatggactacggtacacccgatcccgtggcgtaacaccagctttacctatctgccgtggtggatctttgatatcatcgtggctgcgaatgctgcaagcgaagactggcgtgattatgccgaagaaaaatatgcgaaagaattcgacacactgaaacaggcgtatattgattacaccgatgttgatttcatcgaatctcgtaacggttatctgtataagctgagtgattttactcctgctgatcctgtcgtaacaattacaccaaaaaccgctcctgctgatttcaaagtaggtgatgcggatctggctgcaactgatctgtttaccatcgatccttctggtacagaaatgactctgagtgttgactcttccggtcatggttctatcgttggtggtaaacttcatgcggttagtgaaggtgatgttgtcgtaacagcaacctctggatctgttactgcaactctgacggtaaacgttaaacctgcaccataataacaactaagaaggtaaaaatgctactatttgaattcaatgatgtattcgcaaaattcagcgacgcaatcgaagccaaatttggcaaacgcccacaaaacatgacagatgcagaatatgaagctgctgtatcgtccctggttcgtacagatttctatgaaaaactggcgatcgaggtgttgggttgggatatgatgaaatggggcatgacctatcgcgatcgcgaagtcggttttattctcgtcaacgaagcaaaaagcccgtcctgggtgaatagtcaaaaaatcgcgtacatggataaagtatgcgcacagatgggtattgtacgtttagacttctggacttgtcgggatctgaacgaactgaaagcccacgcttaccgttgccctctgatctcccgcaatgataagcatcgtcaagcatgggatagcgcagggaaatatcgtagtgttttcctgaacgacgatatgaacatcactattcaggatgtgaaccgctcctttgcggattacacaccataaacaaaaaagggaaccgcaatggttccctttcttttatgcaatttttctgatttctttcaatgcttcttctttgctaccaacgaagagaatcgctttacctccggcttttctgaatggcaacacagcttttgccctgtcatcaatcagtatacctttgtccgcatatgctgctttctctccgctgcttttggtgtagtggaattcaggcagataaccgaacaccttcatcaacgcttttcttttttgttctgctaccgcatcggaattgtatttccctacgctggttaagatcgcaacctgacctaaagttctcaaatgacagaacaggtcgatgccctcttgtaatggttccagattttcgtagaagtcagtttgtgatatagcctgtttcgcttttttcaattcttcttccggcattctcgccgggtctccgtacatcggaacaaaagaaccttcccagttgaacagtacaccatccatatcgaacaaaaactttttcatatcaattcctcggtttgtgtgtgcatcatattcatatatgttcctattgtcaaccccatgtatcagttttcggtgcgtatgctgcaactttagccactaactctttatcaagctggtcaatggatttttgcggcttgccttttgccttaactttgatgtagttagacttaacaacaaacataccgcctttgtcagatttcttgatttcgctgtcgatgcctactttgttgaagctgatccagatatcgccgtccatgtactgtttcagagagtcgcccatattcaggatcttcgccatagtgagcgctgccccttcgtgggtatccatgaggatttctttaggcactacacgatcgcgtttaaggttctgctgcatagcaatatgaacatcgttcataacccaaacgatatggatgttttctttctgataacccagcgcttcaacatcacgggcgatacttgccagcttgctcatgcttttcagggttacgtcaaagatcaggtttggtttacggtcttccggtgctgctgtgataccagcgtacacacgcgcctggtttttgttggatacgttgaacacgtctgcgatcacatgatgcagtgttgctacgttgtccgggtttttcaggttcattgttttgacatcgtgaccagttttcgctttgatctctgctgccagtttggtactacccatgaccaattttttgagtgcgtcaacgtccagggtgatcccttcgatgcctaacagcttttcgagggtgaaccctttaccagaacccgcaccgccagccaggatgactacctgaccaaatttaggataagccttaccgccgaaggtgatcagcgcttcatcaaggctcgtaaagtctttgaatgatttcatcttagaactccaggtgtttatttaaaagtatttattgacacggtttatgagtgcgtttatagtgcaattgttcgacggataagccggaagaactttaaccataaggtaacaattatgaaaaatgaactgcatgaattcatcaacgccgctgctcttggcgaccagtcaaaatataaatcccgtcgcgataccctaattgacgatttctgtaatctcttggggttcaagcgctggcataccccgtctatgcgtccagattgtgatccaaaatgggattacttcaaatggagtgctcgcgatcgtggttacgtcgataacgtccgcgtaatgtctttcaaccacttatacgcaaattcaacaattgctgttgctaaacgcaacgattcgacttatccgaacgggtggagtgttgctaaagtcatagaaacacttcttcaactgcgtcgcgaatataaatcagcataccgtgtcaatcccaatcctatctataatgaatggcaaatcgtcgcgaaatacctgctgaacatcacctattctattttctgtcgcttcgggacaaaagagattggatttggctctcatgatataattgcagaagcacgtcaccgcatgatccatgcaatcctgaaaattcaaaactctggtgggcttgttctttctgcgttctgtgatgaaattgtttactacggagaacaggtcgaagttgatgatgttcaccacgaaaaattcaaaagatttgtattcgggcaatataacagctattcatatggaaacgatattcgtgtgatgatgcacccgcgcattatgttggatatggaagggtgggaaccaggtcacggaattggtgatgccgaaagccaacgtgaacgccgtgttcgttcagttgctaaaactcgcgaattgatgacaggtagccttactgattacctgttcagaacaaaagaagacgttgaaaaagaatttgttgacttgtcgggcgaatagcgataagctgtaatctctgaaaacaaggagataaccatgaataccattcactgccgcaaagagttcgttgagttctatcacggatcatgtactgctgccggaatcgaaagcatgttgttgcctccttgtgattctgatactctgtctgaaaaaggcagaaagaaaaatctggatcgtgttttcttcactgctgatatcgggctggctcgtatctatgctggaagggctgcacgttcaataggtggtgatccggtactgtatcgggttgtgtgtccggtagatgtggtatgcatgaacgatgacaaaggcgcaagcgtttatcatgctgcatgggctttctgtgaggaattatgaaagataaggtgttagcgtatctcgttttcttgctgggatatcgcgttgaagtgatgggtggttattcttctttgtatggggatttaaccgcgatctggatggttgcgttgggggttatgtttacctttatggcgatctgtattgcgaatgaggctgatcaaaatgcttgaattttatcctgctggttgcaagtcaaatccgcctgatgcatcgttccaatcgtggatttattttcacagggaactaaacgacatcatcgaaagtcagtggaaagaccatcctgaacgaagtgcccccgatttagtcgatagcgtaacagatgtacgcaccctggaaaaagggctgtatgattgtctggttcagggaatggtgtgtaaattgattttgtggtatgctccgatcggttcagatctaactcgcaaaatcgcccgtggctatatcatgacgaaacgtgagtttgaccagatctggaacgaacccgactgtttcgaacgcgaaaaatatgaaaatgaggttagttgcatatgaaactatttcatgttgtgtatggtgggatgaaaaacatcgacatcgccgcgttatctgctggtatgctggacgaactcgaagcacagatcgggaaacgattcaaagccagtatcaccgaaacgcaaactttgtttgtcgatcaccctgcggatatggaaaaccttgtcaacactctggatgatctgatgatcccgtgtgctgatggttggaacgaagcatccggtgttcatgtagttgtaacttttgttcttaaaaatgttgacagcagaaatgccgaagtgttagagtttattcgtaaaattgattctactaaaggaaagtaactatgaaaatcgttcagcgtaatatcagcgaagttagccagcaggaaaaagtacagattcatttcaaattcaatgatctgaaactgggctatgcacagatcgcccgtgagcacatgctcgataacggcgacatttacgtgattgttcaggaaattgagcgaattcgtgctttccgcgcagaaaatccaaaagtgaaacatgttctgcgtcgtgtgtatatcaacaaacatcgtgaagaacagcgtaaacctaagaccaaagctaaacgcgatccgcgtccagataacaaacgtaaagcaatcaacggcgctatggcgctggcgttccaggaagcgggtttggtgtaaggggtttatatgtcttcaatgatgaatcgctggtcgggcgtgataacttcgactatcaaaaaggatttggtgaaggttgaagcaaaaccaaagccagtagaaccggaaaaagttcaaactatggtatcactcgatcctgctgagttagaacaccgccgccgtgcaaagcaaattgaattcgatctgcgtgtcgctcgttcatacaacagtaaaaacgatgatgcgcgtaaccgcaaccttcaatttgctctgacgttaagcgactgggcgaagctaatgagtgaacccgtatgttcttactccggcagaccgtttagcaacaaaggcggttgctctgactcccgaacaatggaacgaatcaacgcttctctgggatacacggttgaaaacacgatcgcagtaaccagcgccgcgaatagcgagaaatcaaatctcgatgcgtttatgaagggttctgtgatccttccagaagtaaaactgaaactgttacgcaaagctgcgtatcaaattgaaaaacaactgaaaatcaagggttaattatgtttgtgaaatattcttctctgactaaccattatgaaggtaaattcatcaatggtgtgatcatgaatggtttgactggtggcgtgtgggtagcgcgtgaaaagatccacggggctaactttagcctgatcacttcggacggtatcaaagtcattccggcaaaacgtagcggtgaaattctccctgctgaacagttctacggttgcgaacccgtagttgcgaaatactccgaacctgttcgtaagatgtgggaaatgatctctactgcgcgtcagttaagcggtgagtatagcgatgaactggtgatccaggtatacggcgaattcgcggggcgtggtgtacagaaagatgttgactacggagaaaaagatttctacgtatttgatatccgcgtcaatggtcagttcctccctgataacgttgttgcaaattacgctgttgctgttggcctgaaaatggctccactgctggcatacggtacgtttgacgagatccgcgcattgcctatcacctttgattcggtggttaacctggcgaactccggtgcgatccctgcaaagaacggcgttgaacctgagttcaaaaacttcatgacgctgaaagatggtgaaggtgagaacatcgcagaaggtttcgtgatgaagcctgttcaacccgctttcatgccaaacggtgaacgcgttgcaatcaaatgcaaaacgacgaagttcacagagaagaagaacaagcaagcgaaccgcttcaatgctccttctgaactgtcagaaacagacaaagtgaagctgaacgaattcacctgcttcctgactgaaaaccgtgtgaaaaatgttctgtcaaaaattgacagcgcgaatctcaccgcgaaagatttcggtcgcgtgatggggcttacggtacaggacgcgctggaagaaatcgaacgtaactacgggcctttcctggaacagttcgaaaatccaacgctggcgaagaaaaccttcactaacgaagcgtcaaatctggttcgtgagaactggggcgcaatcctgaacaatgaattttaaaactgttctcgaaaacgcaaaaacggctaccctgatcggtagccgtgaaccccctgaacgtatcgcgagtatagccataaagattggacgtgctttaagtgatcgggggatcttcgcttactctggtggtgctcctggaatggatagccatttcatgtttgactactcaccagaaagacggcgtataatcctccctgagaacggttttaacgggttgtattcgaatggtaaggatatcatcgactatacagaatacgacacgtacaaagccgctgacgaagcgagaaaggtagctggacacttcgacaaccaaagcgaatggacacaacgccgatacgctcgcaattcaatgcaggtattaaccgaaaacctggacaaacctacagattttgttctattctgggcggtagagaaagatttttgtgttaagggtggtactgcgatcgctgcaaggcttgccagattgtataaagttccaacgttcaacctttggaatcaaaacgttctggatgaagtctgcgatactttagggattaacactaaacctcctactctggattttctctggtgataactcccgaacaatcacgtaattacgaacgcctctctgttgaagaggcattaaaaaaggcgaaacataatggtagaaatcaatggaatcggtgtgaacgcacaggcgggaagcgggacatcgtgggtcaaacgcgaaacacaagatgatccccgctgtggacgtagcccgacactggcggaacgtgcgcgtaaactggttgatgaaatcaacgcgaaaatggtcgaagcatcccgtaaagacatttccgagtatgtcctgaaatatccgactaaacaagcatatacctttgatatgaaacgttttatcggtaaggttatggatcaggaatgtaccgaaaaagcatatgcggatctgggtgaatggctggcggaagaagggtttactttcgatacccagcgcaaccgacaagctgcgttactcaataccttcgcgggttcgcgtcgtattaccaactttagcgatcctaagcgtgacggatatagcgatctgacttattacatcacctggtgaaaataattcgaaaaacttgttgacgggagttatgagtgtggtaatatagctcccgtagacaagacactaacctaaaaggaaaacatcatggaaatcaaattagtacctacttgcgctggctactgcttggcactgaatggtgtagcacacaacggtaaaggcttacgggctaacgttgaagcaatgctgaacgaactgggtgcggtttatgaatatgatgacgttgcaaccagcgttaaaatcataagccttgaaaaagatggtgttaactgtgcgggttggtgggattgctacatcgactatagcgacaaccgggtcttcttactgaccagcaattaaggatcgaacatgtttggaatgaatgagtgttcagaagcggaagcgctcgaagattgggctgactttgatgaccttgatctcgataatgaagatggagaattcttctgtgttgggcgcggggttgaaagaacaaagcgtgaacttcgaagccgtttagcaatggggcgtactgttggatctggaaagaaacaacaagttaaatattccgatggttcgattcgaactgaaacggttgtcaaagaagtaaacgggcgtgtcattacgtccgagcggcagaaggacatcaaacaattgtacgatgttgcaaaagccgctaaagtaggaaccatgatcacctgtcctacgtgcaaagagttgcacaagaagacgacatatcataaggtgttctgctctaatggtaaaaaatccaggaaagactgtaagagtaaatactggaacacgatccatccagaacgtttggatcgtatcttttaaatcaaaacgtggagtacgtttaaatgaaaacttttaatgaactgaatagcctgatcacctcaactgattcctacaaagtgtcccactggttgcagtatccacaaggcactgatgcagcgatgttctatattgaatctcgcggtggtaagtttgatgaagtagtaaccgctggcgttaacttcgttgcgcgggttcttgctgaaccaattaccatgaaacaagttgagttggcacgggtactttaccgtaagcactttgggaaagagattttcaactacgaagggtggaagaagatcgcagaactgggttatgtccctgttactttccgtgcgatcccagaaggtacggttgttccggttaaaaatgccgttgcgactgtgtacgccgaacatgaattctcatggttggctgggtggctggagacaatgacgattcgcggtatctggtatccgtcatctgtagcaacgctatcgcgtgagtgtaaaaaggttctggctcattaccttgatatgacttctgacctgactggtgaagcatataacatcacactgggtacacgtctgcatgatttcggggcgcgtggcgcgacctctgctgaatctgcgggtattggtgggctggcacacctctataacttcatcgggactgataccgttgaaggtatgattatggcaatcagtctgtttgctgactatcaaactctgtttgatgaagttgaaaacgtcgaagcaatcggtgtttcaattccggctcgcgaacattcgactacgatttcctacggtaaagagaacgaagacgaagcatacaaaaacagcatcgaaatgttcggtacagggttctacgcttgtgtgtacgattcctgggactacaaaggcgctgtagatcgcatcgctgaatataaagagcaaatcattgctgcgggtggtactctggttgttcgtcctgattccggtgatatgattgataacatcatgtacaccctgcgtaaactgggcgaaatcttcggttacaccgtaaacagcaaaggttacaaagttctgcataattcagttcgaatcatccagggcgacgagatccacggacctgaaacaatcaaccgtgtgttaagttggatggaagcgaacaagtgggcgagtgagaacatcgcgttcggtatgggtggcggtttgctgcaagaagttacccgcgacactcaaaagtatgctgaaaaactgtgcgctatccgcgtgaatggtgtgtggaaaggcgtttacaaatgcccgaaaggttccgaatggaaacagagtaagaaaggtttgctgatgaccatcactaacggtgtggaattcaaaacaatcgacactctggaaactgagattcctgacgggtggcgtgatgcgatgattacgtattacgacaacggtgtattaaacacctccgatacagtaggggttatccgtgagcgagcaaggatttaatatccgcgccaacgataacggatcggtagtcttctacaacaatcagccccttgtcgctcgcaaggggcttttttgtaagttggtgggctacgggttcaagttggaacaggtggacaacgcgacactaaaagaggttgttcgaattgcttatctactgaaagataaaaaagatgaacaccgtgctattgcaatgcttgagaaactaggcgaaaattattgcttcgtggtgaatcgtgggtataagtacgaaacgatcgccttatttgagaaaggacttggtgaattatgattaccacaattaaagaaggggttgacctccatttaggcgactccgtaaagctgattaaacagcttgaatctggttctgttgacttgaccataacttcgcctccgtatgacaacttgcgccattataacggctctggtgatgtctggggtgaacacgtatggaaagagttgatatcggaactgtaccgcgttaccgcgcctggtggtgtggttgtgtgggttgtgggtgacgcgactatcaacggtagtgaaacgggtacatctttccgtcaagccttgtacgcgatcgaacaaggttttcggttgcatgatacgatgatctatcacaaaaccgctctaccgaagaaccataaccgatacgaacaggactttgaatacatgttcgtgtggacaaaaggcgcaccaaaaacattcaacccaatccgcattccgtgtaagttccctgaaaaggaaaccgcacgacaaaacagctacttttccgaaaccaacgaaaagaaccgttcagcccgttccggtaagaaacgtaaacctgttggcaaggataaaattaagggtaatatctggtattacgctgtagggcgcaatcactcaacgaaggacgagattgcattcaaacacccagcaatatttcctgaacaactggcagaagatcacattaaaacgtggacggttgaaggggacttggttcttgatattttctctggttctggtacagttatgaaaatgtcgatactaaccaacagacggttcaaaggcttcgaactgatggagaattattatcacgattctattcttcgtgttcagccatacgttaacaatctggaatcttttctatgagttatttgggtgttatcccgtatacaggtaacaaacaatcgctattgcctgaactcttcaagctgttccccgaaagaagttcatacatgcgtttcattgattgtttttgcggtggccttagtgtgtcgttaaacgtccctaaacccgttctaagcaacgattacgataagacgctgattgatatgtatgagcgtcttaaaacgcttcctgacctgtctccggtgcgagaattgattgcatcaaaggggctggggaaagacaagaaagaagagtatttgaaattccgtgatgaatacaaccagaacaaagatccgttatggctctatgtcctgatcctgcattcattcagcaacgttaaccggacaaacgacaaaggcgacttcaacgctaatttcggatgccggacgctcaacgatgcaacagtaaaacgctttgaacatttcaaaaagaatgtgaaaggcattgagttttccagtggttcattccgtgacattgatatctgtgaaaatgatttcgtgtactgtgatcctccgtacctgatcaccgatgcagtgtataacaagttctggaacgaagatcgcgaacgtgagttatatgctttcctggatgaactgcacagcgaaggaatcatgttcggactgtccaacgtgactcaccatgccggaaaacaaaatgatatcctgattgaatggatgcagaaataccgcgttcataatctggataaaaagtatctgttaggccagcataccgactcttacgagcaaaacaaaacgcaagaagtctacgtgtgcaactaccagaaacgcgacgtaaatacattccctttaacactgaacgatttaatgtaggttaacatgtttaaaatttatggctatatcccttctgtgtataactgcgctccatgcctgaactcaaagcgcttgctggacgcgaaaaaacatccgtatgagttcgtgtctgttgcggattccgtggaagacggtaaacctgtactgaacgaagcggtgatcgatgaactcgaagcgcttgttggtacgcgccggatgaccatgcctcagattttccatgacgggaaacatgtaggcggattcgaccaacttcgtgagtacgtccgcaccctgtaataaataatgacaccttactgaatgttgttattatgctgacgaaacgaattaccaaaaaagactacccaactatcaagcaagctctctttgaaaaacaggggggctgttgtgctatctgtaaacgtcccctggagggcgagatcgagaaacatcaccttgaccatgaccatgctttagacggcgaaaacgccggacgtgtgcgcggcctactttgtaacctatgcaacggtacagaaggtattgtgaagcacaaattcaacagatccggtctggtgtcccgtgatgtcgattacatccagtggttagagaacttgcttgcatatctgaaacaagactattccgaaaaccgtattcatgacaaattcataccagataaggtaaaatggttttcaagacttaccaaacctgatatgattgccgaaatggtttctatgggcttcgagtacgccgacaaagacgaacgcaaagccttaaccgcgaaatatagaaagcaattaatgaaggcaacgaaatgaaagtagaaaaacgcgacggtaaaaacgtcgatttcgataaagaaaaaatccgtattgctgtagaaaaagctggcggtactatgacggatgctgatgccgcaatcatgctggttcagtacaatcagatccgcgatggtagcgcaatgaagatcgcccgtatccaggaactcgttgaagaatccctgatgaaaacgaacccagcggtcgcccgtgcatacatcgaatatcgccacgatcgcgatattgcccgtgaacagaaaagtaagctgttcaaagatatctccggcatggtgaatctgtccaacaaagagatcaccaacgagaacgcaaacaaagacgcacgggtattcccgacacagcgtgatttgctggcgggtattgtagcgaagcatttcgcccgtaatcatatccttccgaaacatatcgtagaagcgcatgactccggcgacatccattatcacgatctggactatagcccgttcaccccttacactaactgctgtctggttgacctgaaaggtatgctggagaacggtttcaagatgggtaacgctgatattgaaccgcctaaatcgatcggtgttgctaccgctctcatggcgcagatcaccgcacagattgcctctcaccagtacggagggacaacctttgcgaacgtggataaagtgctggctccatacgtcgaaatgacattcttcaaacatctgcgcgatgctgaacattacggcatcgaacactataatgaatatgtgtatgcgattgaaaagactgaaaaagatgtgtatgatgcgttccagtcctatgagtatgaagtaaacaccctacatactgccaacggacaaaccccgtttgttaccatcactttcggtactggtacgagcgattatgaacgcatgatccagaaagcgattctgaaaaaccgtattcgcggcctgggtaaagagggtattactccggtattcccgaaactggttatgttcatggaaaaaggaattaaccttgatccagaggatcaaaactatgacatcaaacaacttgccctggaatgtgcttctaaacgcatgtacccagatatcattagttcagctaacaaccgtgttattactggttctagtgttcctgtatctcctatgggttgtcgcagtttccttagcgtgtggcatgatgataacggtaatgaagttcttgatggacgtaataacctgggtgtggtgacaatcaacctcccacgcatcgctattgaagcggaagcacaggaagaagaagacgcgcacgacgcattctggcgcatccttgatgaacgtctggaactgtgttttgaagccctgatgactcgtatcgaaagcctacgcggtgttaaagccagtgttgcgccgatcctgtacacagaaggtgcttttggtgttcgactcaaaccggatgatgaaattctggaactgttcaaaaacgggcgtagctctatcagtctgggttatatcggactgcatgaaacgctgttgatgtttggctcaggccagcatccattcgatcgtatcggctcccagaatatcggcagattgatcattgagtacctccgcgctgcaaccgaagcatggaagaagaaaacaggatatggtttcagcctgtattcaaccccagcggaatctctctgccatcgcttctgtaagctggactttgagaagttcggaagcgtcaaaggtgtcacggataaaggctggtacacaaacagtttccatctggacgttgaccgcaaggtaacaccgttcgagaaaatcgactatgaagccgattatcattacatcgctactgctggtcatatcagttatgttgaattccctgatatgaaaaacaacctgcaagcccttgaaaaagtctgggattatgcgatggaaaaactggactacttcggaactaaccttccggtcgataagtgctttgtatgtggctctgatgacgagttcacgcctacagaagaaggtttccactgtaagcactgcggtaatcacgatccggctaaaatgagcgtcacgcgccgtacatgtggttatttgggtgctcctgctgtccgtggtttcaacgacggtaagaacaaagaaatgatgcaccgaactaagcatcaaaattaatcaaaaagccccttgcgaaagtgaggggcttttgttatattgcacataccgaaactatgaggtattgaaaatgatgtactggacaaaagattattttgaatttcgtgacgaagaaagttttgggacggtgtaccgcaatttagctttgcgtggtagtcctctgtcgcctaatcaactatcatctgtcgtgtttcctatcaaggtaacgcactgcaaccggaaaggtgttagtgggatcgttgatgccaatggcacaacatggtattccgaagattcttatctgtttgataatgaggatcgcggtttctttaaaaagtttgtcgcgcttaaacctgctgttgaaaaagccgacgcgcaacaactgctggattgttctcacctgctgggacggatttacgtagatggtaagctggtgacgaaacctggcgatctggaaaaattcttgcgtaaggcgcgggaaactaccctgaaagacaccgaaaagcgttacgatactgcaaccgccaatctacatcgtttgtctgatgaactgaaagttctacggggtgaatgatgtttccattaaaggcgcgggtacgcaacaaaaccggaacacaagaatggatggagtgtttacgcgaaactaaacactactacatttcacaggctgtaggctatgacggaaagaacatccgttataacaaagtaggtggtaagcgtgtggggatggaacaatatctccaattagaaaccgtccggcctgtgaatgttcctttcgatctgaaactaccaaacggaaagccaacgatatgatcgggaaaatccttgatactctgtttccctcccgtgtacgcgcacgggtagaaagagaaaacagactggaagagatccgcttcaataagttccttgaggacaagaagaagtgcgaagacgagaaacacccaaacgcaaaaatggctgagggtgtatcgaaatgttctgtcgggcggttctgggttgaaaaggattatcttgatctgataggtgctattgcccccggcgttacgctggaggacttctcccgcgctactgggcgttcgtatactggttgcatcaaccgcttgcgtatgctctctatagtggtgcgtagtgcgcatttcggctatcgtgacgttatccgtccggtgatcccagtaagcagattaaaattttacatggcgggtggaaaaaggcttgacttgaccaacgaactgtgtaaaatgggctatatcagagaggggaaagttgttaaagcccctgaatggttcaccaatcaatttgaaatcaaataaggcaaaattatgttcaagaaacttgtatctttcgtgactggtaaagttgaaactgcaatcgaacaaaacacttccccagaagaagcctggcgcagtgctgcacgtatcctgatcaaagagatcgaccgtctgcaacatactcgtgtttctgctgttcaggaaatcgtgaagttgaaaaagaaagtcaaagaacacaaagaccttcacactggcaaagagtcggagatcaaaaaacttctggcggcagggcaggaagtgtcaaacagtcattacgtgctggcgctgcaacatcgtaacatctggcagggcttacagacgaagatcgaagaactggaagggatgaacaaagagattgatctctctgtcgtcgaactggatcgcaaactggctgatgtcaaaatcaacctggagatcatcgaactgaacaagcaaaccgaaagtctgggtctgactgtaccggaagacgtgatcgccgctgtaggccacacctccgtaagcgtcgataccatcgtgacgaagattgatgtgttgctgggtggcaaaaatgccgcttctgtaacctccgctgacgttagcgcttacatcgactccctgaacgcgaaataagaggaaggggcgcaagccccttttttgctatgagttatactattcaaaaatatggtaacgaccattggataatcaaccatgctcgtaattttcgggtaaaacttccgtctgattggtggtgtcttcctagtgatgaatgcgaccgattgatacggatgttgcatgatggggcgattagccagcaagtttttcaaggaatggtagaccatgcagcatcgcggtcacaagaaaagtattgtgctgaactcacgtttgatggtatggttaattttcatcttaaagaatcatatgaaagaagtgcaacggaagttcttagcgagatttacgaaaaagagaggaaaggtgaaatgatgttcgaagatggtgcatttaaaccagcacgtaaaacgtatccagactggcgcaaacagtacgcagaacagttatggcacattgacattcccgaagcgctcatgaaagcgattagccctgcggttgactactattcaggctggaaagatgaatatgagttagaggtcggttcgtttaaggcgcacgtcatcaaagcgaccagaattcttgatttcgttgaagctgttgcgtcatgtgatatcgttgaagatattcgtattccttcaatcaacgtttctcggtatagttctcctggtaacatccgcggggatcgttatgcgaacctggcaagcactacggataagctgaacttccataaaatcaatgaaaaaggatttgatggttgtgttctgatctcaatggtggttgtcacgacacaaggcgagtacaaactgatcattgattgtgacaaagcggctcgtgcaattcccacaatcaaacaatgctttggtgaagatttcaaagtattgatgaaagcccgtgcgatggaaaagttcatccattcgtgcaaaaagaacgtgctggagaagtatgatccggcgctcacatacaccaaaattgataaagatctggtaggtgatttatgctgattaacaaagcgcagtgcaaagcgattaattttctgctacacgaactgattgaaaacggtatcagatttgaattcgttgatccgattaacggtgatgatcgtcatctgctccgctgggtgtctggtagcaatcctctggattcagtctcccaggttgtagagtctgcacttaaacatatgccttgtcgtgttctgttgggtagcgttaacgcctccacatggaatggatctgatgcttattatgtcggattcaaaaaagagttgacggacgacgaatgatgttataatatgcccctgtagacaacaaactataggggctaaatcatgaaaatcaaaaatactgctactgaaaatctttgtaacgaaatcgcggtgacttactggaaagaaggtcacgtaaaagcaatgaaggattttcaacagtggtgtgatacccagaagttagccaactgggaatacgccgtaatcgtggaacggatcaaagaactgatccttgagaagaaaggcactataaaatgattcaactgaaattagacacacaggcgctgaacaacctgttcccagaagggacacaagcgcgtatggatctgcaagccgctgtcatcaagaacgttgttgacagcgttatcggtaagcgcgtaaccgaagaaatcgaaaacatggtgatcaagcacgtcaatttgatgatgccagccaatcacgaaatcgaaaagattgtgcataaagagtttgctgattacattcagaaacgttacgcatacagcaatgttttcgatatcaattcaggcggtatccgccagatcaaagaactgatcacgacaaacgttaaaaaacagtgcgccgacctgctggattcaatcaagctggaagcaatcaacgatgcaaccggaaacctcaaagcggacgaagaagcgtttattgctcgcgtaaccaaaaacctcgaagtaacggttcgtcaggaaatcgttaagcgcgtgaataatgaattcccgcaaattatcgacgaagcgatcaaagcccgtctgttcccagaggcgaaaggctgatgaactttgaccgcatctataacatggatgtggttaacggtaaaggaatccgtgtagtgttgttcgtgactggctgcaatcataaatgcgaaggttgctacaacaaatcaacatggaatccccgcaacggtacaccatacaccgaagagactgaaaacgagttgattaaactcctttcaaatccccatgtggacgggttgacgcttacaggcggcgatccgttttaccgcaccaatcatccgacgctcttaaaactgctccagcgcgtccgtgcgacgttccctgataaagatgtgtgggtttggacgggttacaccctcgaagccttacagggcgatacagaacgctctaagctgttaccattcattgatgttctgatcgatggacggtacgaaaaggatctaccgactaagaaaccgtttcgcggttcggataatcagcgaatgattgagttcaaaaagaattccatcgaaattaaaaatatcgcttgacctggttggtagttctgttaagatatccacatcgaaacaaacttgaggacgagaaaatgaaaaacgcaatcatcaaagaaatctgtgaactggttgatgtgtatggttggagtttgggcgctgcaaaagcagaagccaaatctcgtctggaagttgtaatcaaagcccgtagcaaagatgaatttgttactaaattgcaagccctctatgagagataatatcatgatcctgaatttcaaaacccgtaaagaagcccgtgactattgctggaagtggtcgatcccgctgaaaaacatcaccaaaggaagcggttcacatccgtggacggtgagaacaaaagaaacccgcttcgaaactggcaaagattacaagctggttgatgccgaaggtttcactgacaacggcaaaaacattgctaacagtgttcagtcaaaacagatccaccaattgctgaacggtgttgtacatatcgcaagccgtaacggtgatcgctataccttcgatgctccggcaggtgttgctatgaacacccttcgtgcatgggaagcgaaatacttcacagaagttgctccggctaaagccccagcgccaaaacgcgctaaaaagccaaaaccagtaggcaaaccgtccgttgctcctgcaccagctaaaccagatctggattcagaactcgacggtggcgttaacctcgctccgacaatcgaaccagttgcgaaacctgttgcaccacagccagcaacggttgaagcgatgcctggtaactttgttgcaaaccgtccgtatgttctggtagatgtagatggtttcctgcgctctcataccgcgaataaacgcattgtgcaacacatcaaaaataacaacggagttctggtgtttgaatccgttgatggtgacggcgacgcggtgatttataaagatcgtagcctcccgtttgtaatgcatcgtgagcgtaagttcttccgtgaactcggtactggcacagttcaggcagataccccagcggttcagactgttgacattgccaaacagcaacgcgataaagagatcatcgaagctgcacaggcagtagaagatgcactggcagaacaccagaaagcgatcgaagttgtcacacagaaagctcgcgcagttcgcgaagccgctgcaaaacttgcactgctggcacgtaagtaatataattcgggggtgcttacgggcatcccctttttatttgaggtaatcatggaattattcgctggaaaaacttacggtttaaccgtatccccagaagtctttgcagaaaagacctggaaaacaggtatcgcaaacatcgttcgtgaaaaaggttatgttacaattgatcgcacctcgatcggtgagttcgaagaccgcgcatttatcatggacggtggctacgaatatgaactccctgcatcactatggaaatggttcaaggaagtaacgccggaagatggtgaattcaccccagaagaaccagaagaagttaatctgggtaaaggtgtagaggctgaaaacgttatgcgtatcgctacaccggaagaggtttccgctggtgtcactggttcggatctgtgcctgatggatatccctaaattcacgtatcgccctgtacaggaaaatcctttgcgtgatctccgcatcgatccatcatttggggctaacctggaaacgttgagcatcgcaccgatgccagtacgtaaatctgatgcaatgcttcgtttcgccttgcaacatgttttcagtggtggtagcatctatcaaatcaacatggaatctgaactgaaaatgcaggaagaccagattgcaaacctgttcgatctgcacactcagttaaccgctgttgaaaatatcgaaaaactgttaggcaaagagaaaaagcgtattttgcaggatctcaaaccatacgggaagaagaatgaaagtcgaaatatacggaatccccgaaagtcttcataactgttacgggtgtatacaagcacaaaagctgttgacagaaaaagggatagaatatacattttatcccgttctgaaagaagcgaaaaacgatctgggctttgaatacgatcgcccacgtatcgaagagttagcaaaacgggtaaggcaacgtagtttagcgtttcaatacccgcgtatttttgtcgataacaaacttatcggcggttatctgcaattgaaacaacttattggtgattaaatgagccgtgaaattttactccctgctgcaaatgctgttcatgctgaaacaatggaatacatggagaaattcgttgaacgcgataacaccgcgatcatcactcctactcacctggacgcgctcgaagatcgtcttcataagcagattaaagatcaatttcctgaaaaggttagccgcaacttcattcgtcaggaaatcgttgcaatgatgctgaaacattatggcgttgaaatcttcggtgtcgaaccactgaaaccgaagaaaccgcgtcaaatgcctaaacagatcaccgacgaagcaatcaagaaataccagaagaaatacgctaagaataaatgatctttaatacgattgaatgtgttccgtcaagtggtaaaacaaaggcgattctgaaccatatcaatcaaacgggcgaaaaagcaatcatcgcatcgatttccatgatgttatcaaaacagtcttatgactactacatcaaccaggtaaaaggaaaacgagcggtgattgtggacacggatcaccgaaccaaaagaaccaacaatgacgcgctgcgtgaggttgtcaaagattatgatgtgatctttatcactcatgcagcactcaaaaacattgatgactttgatttgtataaggatttttccctgtacattgacgaagttcctgatttggttgcgttcgaaagtctgcgatttaatagcaatatcaagcacatacgcgagatttgcttgccgtttagttgcaatgccgatgatatcgttgatttaaaacttgacgaagaaaaacgagaactggttacacgattagcctatgatgggcttcgtaaacgtgatgatatcgcaatgaagatgttcccgctttaccgtgctctgttaggggctattccggtgaagatgcaatgtagcgattcgggatatgtctgttacttcgtagaggatcatgacgtaagccagtggaagttcaaaaatgtaaccattgcttcatccaacatcaaagacacgattacagggaagatcctgcaaacgtttcatgatgtggagttcaaagattcaccgcttcaaaagctggttgactttaagcaatacaaaaacactgggcgcatacatatacatgtgctcgcagagggggattattcgcgttatacgggcgatctctctcaatctgggacgacagtatacactcagattaaaaaacgcgtggaggcgcttttagggggcgaacagttcatctattgcaccaacacatacagatcgaagtttagcgaggggcaggaaattccgtataactcgcatggattgaacttctattcaagctatactaacgtggttgcattattcagttacaacccgttaccctggcttcgtcaaatgttgcgagcggttgcggtgtcctctggactcgaagaggaagaattagttgatgcttatgttgtcagtaaatattacgaaccagcctttcagttatgcgctcgttctgatatccgacacaacaacagcaaacgaaagattaatttatttgtgcctgatatgcggttagcgaaatacatgaaggaaaaatattttcctgatgccattatcgaaaccacagaagcagttcaaacgaaaaggcaacgcaaatcatttcaaacccttttccaaatgacggacaaagagaaaaacgcttttacgccatacaagaaaagaaacaaattagattatgcgaatcctcttcatcacgcgattgttaaagattggctgaacaattaccgtgagaaaaaggcgacttgatggtcgccttttttgtttataaatatcagtattgaataagataaaggaaaacgataatggtagctaaatcattccgcgccacaagtggccttgatgctgctggcgaaaaagttatcaacgttggtaaagcatcacgctctgtgttgagcgacggcgtgaacgttgacttttttaacgaatttaacacgatccaacaatacgattctacccgtggttatgctgcgtttatggctatcatgtacgcgcgtcgtatttggtacgctcgcgcagatattccatcgccagcgggtgctttcgatgaaacaaaatggatctcaacccgtaacgatccaaaatgggtatataacaacgtaacgagcactgacggtctccctcttgaatccggtacgtacttaatggctgatggtcgtttctctgaactgacctatattctgccagatgcccctgttgagggtgatattatcaccattaaagacggtggcggtcttgcaggggttaacaacctgttagtacgttcaaacacccgtcagatccgtttacgtgatattcagtcaagctcttatcgactgactcacccatatataaccgttgcgtttatttttaacggcaacttatggcgtgttgctgaaatgcgtgataaccgtgattcgcagtttgttaatgcgactggtttaaccgctttccaaatgcaagcgggtatggtaacattccgtaacagtggaacgggtaaaattacgttgcagttgcctcgttacgcaaatgatggtgactcaatcacaacttacgatctggatcgccttgcttcggtgaacgttgcgactctgcaagtttatcctggtagcggacacacgatcagctatgacggtatcaataacgtaacctctgtgacttcacagcgttccggttatggtatcttcatgttcgatcaggctaataaccgttgggttgtttatgacggtgatcagcgcgttcgtctgcgtcgtatcagtgatgacctgaacatgttgccgaacgattacgtgttcatcactccgattgctggcaacccaccaactgtacgtaatgtaacgctgactcttccgcaagatgttgcagaaggtgatcgcgtatatatcagtatgtacatgatggggaaaacgcagaactgtacgatcaaagttaaagatggttccggtgaaaagatccgcaccaacaaaaacatgatgcagttcccacagcgtaaggattatccgcctgatgactggttcagtgttgacactctgactttcaacgccgatactgactatcttccatatatggaactgtcatatctgaaagcaacgaaagaatgggtagttgcacagtatcgcccgatcattgaacgtgtcgatccaacaaatcgttctcgtctgggtgtgattgcgctggctacacaggcagaagtaaacaagaatcatgaagatacgccgtctgatgaactggcagtaaccccgcgtacactggcgaataaaaccgctactgaaacgcgtcgtggtatcgctcgcctggcaacaactgcggaagttaaccagaacacgacagcaaccttccttgatgacgtgatcgtgacgcctaaaaagctgaacgaacgatcagcaacagaagatcgtcgtggggtgctggaaatcgcaactcaggcagaaacaaacgctggtactgatgacactaccgcaatcacgcctaaaaagctcgacacacgccgcgcgaccgaaaccctagcaggtatcgggaaactcgttacaacgggcgctacgacagcggagggggctttacgtggggatgctggtacgaacgtctacaacttcaataacggtgttgatctgatcaccccgaaatcattgaacgagaagacggcgaccgaaaagtcaaaaggtctggttgttctggcgactgaaaacgaagtggtaactggtgctgctgcgggatctgcttcaatgccgatcgtagtaactcctgaaatgctgcatcgtaaaacgtctactgaaacgcgtatcggattgattgagatcgcaacccagacagaaacaaacacgggaactgatgatctccgtgctgtaacgcctaagaagctgaacgatcgtaaagcgactgaatcacttgatggtattattgccctcgctaccactgcggaagttgcagcaggtacggtaacgaataaggcggttgttccggttaagctgaaagagttcttcgacgttacaagtcatgttgcggttgctaccgatgacggtttaactcagtccggcactatctggacaacgattaacctggggattgcgtctgctactgaaacacagcgcggtactttacgtgttgcgactcagggtgaaactgatgcgggtcttctggataccgtgttcattacgcctaagaaactgcaagcgaagaaagcgacggataccgccgaaggtattattcgttgtgcgactaacgcggaagcgggtgcgggtactgctactaacctagcaattactccggctaccatgcagttcttgaacggtactgatccggcgtggggtgcgacgacaactcgacgcggtgcggtgtttatcactacccaatcaaacactttcatcggtgataatctggttggttctactcaggccgttgacgattatctcgaagatttctatgctgtatcgcctcgcggtctgaactttgctctgcaaaacttcttaccgaaaatggcaacggcacagaatagtttgagtctgggcggtgtggttgctgcaagctggatgcgtcgtgatgcaaaccagacggtaactggaaataacacgtttaacggtacaagcaacttcgttggtaacgtaaccactaacggaacactgacggctaacgctgcggtaacggttaacaacaccgtaaccacgaacaataacattaatcagtctgcgaaagcaaacactgtttatgcaaatactgttctgagtggtgaggctgcgggaaccaaaaacttgcttcgtaccttccgtggtggtgtggcggatacgatctggcatgaaactgttcaggcaagcacgtatcgcctggcgacgggtacaacggatctggttgacgttctgacagtaggtgatgtcggtaacggcacaatggcgtattccggtacgaacattcgtctgaatggtaaagccctggctaacatcaacacggcgggtgatttgtttgttgcaagtacagcaacgcctacggtacaattacgaaccgctgcaactaatggttggaacggtgtaacaatcagtaatgacggcggcacaaccactgcaaccgtgatcaacacccgaaactttacccagcatcttgacagtacctatgtcaacgtagcgggtgatactatgactggtgcgctgtcagttagcgtaaacggtacgggtggacgctttaccagtgtgagcggtacggcacatgttcaggcaggtgatttctctgggaacgtccagaaaatgcgcttaactggcattgacgataaggtattgactgagttcaacatcaatatcaccgattacaacaaagcgatgatcaacggaaacctgatctatcatgcgggtcgtaaaccgactccggcagaaatcggggcggtagcggtagcgggttcaaccgtcgatactctggttgtacgtaactatatcaaaatcggtaacgtgaaaatcttcgcaaacccagcaactaagacttgtgaatttgtgtgggaggaataatttaaatggcgaataacgaatttatggcgttattcggccctgatagtttcacggcgaatgtgttttcagaagcaaacgccgtgaaatatcgccttgttgtccgtggaacgaataacgattctgcggtcaactcggttgaggtatctattaacggggctgatattattaacagacggacacaagttgctcgcggaattaacctggcagtcattgatggaacaactttagcattattggattacaaatcatttgatatgtatggtgatcctgctacgaacgggaatgcgattaaagactacctgaattcacttccagcgaacagaattgtgtgtttttatactttcgatgcgatcagaagtgatgataactttttagcgacaatgaggaaaattggttctgttgcgtggcccgaaactcggttctttaatatcccgatcaccacaaccaactattctcaccgttcatcctattcagctatctattcatcaacgatgaaaaagatttgcatggaaaactttgtcggtggttctggtacggggttgaaagacaatacaacgagttttgttgaagttgtgtttgatgaatttagtgatatcggggtaactggtattcctgaaagaatgctggatgatcctcaaacgtatagcggtaatggttatccattcaaagcatacggggtttggaacgttgggagtgatgtttctcgtaatgatattttcaaaatcactgcggacatctatatcgatcaggctgcacgtaatgcgggggcagaatgttatctgtatgcctttactcatattgcgtctggacagtggatatcatcaacagttcttagaacaactggacttgctgcggatacatggcattcggtatcgggatattacactattccagataatgctgatataactcgtttgggtgtttctgcttatcattatccgtcaacagttaccacaggtcaggcccgatgccgaaatatccaattctgtaaagtccctcgcgaagaggtgaacagaaacggggcggctatcggtgtcaacggtattaggatgcaaacactttccgaagtcactgatgctggaaccgtaaacccgattgaacaattgctttctctgcctgtttcgcctgttggggttatcagtgacaagaaaattagttcgcataactttgctgaacttgattatattgtttctgatccgactgaatatacttctaccaatacagcggagtaccagttcaaagaatggactgctacccagcaagcggcggtaacgaaagcatcactaagcagttatggaataaaacctggtgatacgatccgtatgcaatgccaaatgaaacgtgatgcaacagcaatcgcaaatagtaagggcgcgtacatcgtaatgcagttctgggatgcaaacaatacgtatatctctggaattaacatgcgtgatgttggcacgatcccgaacgtatattcattctacaaaaacgaaggggttattcctgctggtgctgttatgtttgatttcggtttatatcgttatccaaacaacacaagcacaggttcgatgtccgctaaagacgttaatctgtcaattgtgcgttaaaggggcgaaagcccctttttcataaatacagtcattacaggagaaatttttatggctgatttgaaattaggtacaacgctgggtggtgcgggtatctggagtgcttctaaccttcctctattgccctctggtggacaattaacgtataaaggctggagagtatacaccgaaaacgatcgtccaacagcggaggatataaacgcactatcgacgattaacggcggtactgttgcgaagaatactacgtttagtcaaaacgtgacagtaggcgttctgttgaccgcaaacactattcaatctaaccagtcggtcgggatcactcgaagtgctgctgctccggtggttgttttccgtcgccctgatattacttcggttcctggtgcggaatctgggttgatggacattaacgcatacaacggtatttctggcggacagttagcgggtgcaattaacgtgaacgctcgcacagacggaggtaataaaatatacatccgtgcctttaaaaatggtactcaaaatacgctgttgagtctggattcacaaacccaacaggtaacagttgagcaaggatctttccgtgtaatcgggacttctaacctcggcttaacgaatgctacatcaatggcagttagtggcgcgattactgcgaatacagtaactccgtcaaactgggctaaccatgatgaacgttatatcacgggtattcctcgcggtatgtctggaaacagtttcggggctgctgcggttactgaaaagaacgatgttctgtcggtcggtggtaacgtaacggacggtccatatggaaacacaacatattacggtcaggttgccacatatcgccgtactctgaatagtggtgtttctctggttcagacttactatgatataacatcaacatggattcgtgctgcgacgggttctcctggtgcatggtcttatagtgcgggtgatgctaatggatggagaagaatttatgatacttcgcttcctccgactccggcggaagtaggggcagtcaataaatccggtgatgcgatgactggtgttctaacactggcaaacatatctcaaccacttaaaacacccggcggtggtattctggctaatgacgggaacgtgtatatcaacaaaagcgggtttgcaggatggatcgatgcactgttcttgaaaaatacaggaggcacggtaacaggaaccatcaaccaaacaggcggttattttgatgcatcgggggaaggtagaggttcttgggcttcacaaaacaccgcaaaagctccaattttccaaaccattaacacaacagcaacttccgaatactggcctattgttaaacagtattacacacaagctggtggtgcttggtctatgggtacgttggtaaacactaaccgatttaccgttcattaccgcacgagttcggtagatcggcagtggtattttgacaattcaggtgaatttgtatcatatggtgatattattaccacctcggcaaacggatttcgaattgcatatggtaacaccggatcatttattcgcagtgacggaaacaacacgtatttcctactgacaaatagcggtgatgtttatggtggatataacaatttgcgtccgatctattacagcaacaccacgggtgctgttacaatgggacatacgttatccgttaatggtcgtattagtcaatctagtagttatatcgacaatggacaattattgttaaatggtagtggtagcggacgtatagattttattcgcagtggtgcaaaccctcgcgatatgtatatgttccatgctggtgatgcttctcgtggaaaccgtattgaaatctctgatagtgcatcatatctggtttattttgaacgcaacccttcatccggcattcagttggtaatgaacggtaacggtagctttaacgatgtgtatattcgttctgatgaaagactgaaaagcaatttcagtaagattgaaaatgcattggataaagttgatttgcttgatggtatggtgtacgacaaagcaaatcatatcgggggtgaagaaactacccgtgaggctggattagtcgcacaacaactgcaagaagtattaccggaagccgttaagaaaggtgttgatggtgaacagaacgagatattaactgtttcttcttctgctgttattgcgttgctggttaacgcagtaaaagaactccgtgaggaagtcagggaacttaaatcccgctaattaaaagcccttcggggctttttctttttataaatatcataaaagcatttgaggatctaataatggcagatttaaaagcgggtactaccgttggcggtaatactatctggagtcaggctaatttgcctttactcccttctggaaatactttaacatacaaaggctttaaggtatacacagaaaacgacaaaccaacaaaagccgaaatcggattaggcaacgtaacgaacgacgcacaggtgaagaaagctggcgataccatgcaaggaagtttagagttacaaggttcggcaactgaattgaaattaccgttcaggatcgcaatggttcgagcaacagaaccttatctcgttgctactcgtaccgacaacaacccagtaactaacggtttccctagcgcagaaacacgcacttttgttatacattcaaaaacaacttcaccaacgtcagatcctaacgctggggcaaaccttgttgatctgatttgtacccaacgccctgcgggtggtggtgcttattatatccgtgcttttggcgcaccaaacacaacaactggtgctgctgggaccattcgcgctgaattgcaaatgctgggtgataatggtcttgttagtttaacagggacgcaattcaacatcgggatgcaaactgttgtaagcggtacgatctttggtacgcaaatgtctatcaaaggcgatggaaacagaaacttatatttccaggatgctggaggtaatgaattgggtttggtctacgttgatacagggaagaacgtttatgttcgtactggtggtggtgcgtatgcaactcgttttgcttctgatggaactttagttctcgctaaccatctaaccgttcctggacaggctacgtttaatggtctgggtgtattcaataaccgtgcttccgttgaaactgattatgctactcaaggaataaacacagcaatacttcgagtaactacaaacggggatggaaacggggttggtgatggtgttacccacttaggctataaagatggtaacggaagatataaccattatttccgtggtactggcgcaacgtatattaacaccaaatcaggtcttaacgtaaacgtaccatcgtattataacgaagttccacagggcacaccagcgcaatatttcttacctactgttggacagggcgggaaaaactatttgcgccagttccgaggcggtaatgcggatacgatctggcatgaaactgttcagggtggcgtatatcgactggcaacaggttcaactgacggacaggaagaattagcaatttctactgcgggttatgctcgattccgtcaagagatacagagtaatacttatggtactggcggacaattccgcgccgtaggaggaaactatggtttcatcattcgaaatgatggtggaagtacatatttcttacttactgcatccggcgatcagtatggaacatggagtggtctacgtccgtttactatcagtaactcgaatggcgttgtttctatagcaaacggtgcaaacatcaacggttctgttaactttggtaacgcggtaaacttcaacggcacggtcgaaacaaacggtctgggttgtggtactgcaaacggattgggtacgactggtatttctctgggtgataacgatacaggtttcaaacaggaaggtgacggtattctcaacgcctatgcaaatagccagcgtattatgcgatggactactggcgcaactgctaactataaacagtttacaggttcagggtgttaacggaccagcattacttctgaataacacagcgactaaccaatcatgttatttgctgattactttggcaggtaacaacggcgcatacttcgggtttggtggtgctgatgataacgtatcggtacacaactaccgactgaatacgaccttacagttgcgtgcttcggatctgtatatgaaccgtggtctgtatgttgaaggtaacgtaaacgccaacgatgtgtatattcgttccgatattcgactgaaatcgaatttagttgaactgaaagattcattaagcaagattgaacagcttaaaggttatatctacgataagcaatcaaaagatgctgatgatatcgtataccatcgcgaatccggtctgatcgctcaggatgttgagaaggtattgccggaagcagtgcgcgaagacatcgacactggtatgttaaccatttcaccttcgggaattaacgcgcttctggttaacgcaatcaacgaactgcgtgaacgtctggaagcaatcgaaaacaaattaggggcttaattgcccctctttcatgaggtattttatggctattgtaggagttcctggctggatcggttcgtctgcggtcactgaaacagggcaacggtggatgtctgctgcgggtaacgcggttcgaatcggaacaccgttttatatgtctcgaatggcgggacaatcggtatataacatcacctttacggtgtatgagcgttactataacaacgcccgttatcgtggtcagtggggggttggctggtattcgccatattcaaaaccttccggtcatggagcggttagtggtagttttaatggtaatgcgttcggtacttgtgtttctgcacaattcagcaatgagattagtgtaattactattcaaaatggccctgctgttaacctaagacttacgatggatgacggcggtgtgtttgactttgacaataacggtcgtatacaggatggatatcgccaatatcagattgcttctgcccaacataacgcgtggtatgactatttgaacgcccgtgtaggccaaacacgatccggtctggtcactcaacgttaagtaaattcctaaatatgttcgggggtcggcatccccgaacttgaggattaaacatggcgctattacaagataaattggcggtgcttgaacgaataatatcgttcatcatggcggtcaaaacatggaaacagttattcattaaattggttcttatcgtcactattttcattatgttcgtaacatggtataagtgggatgacttattttcagtctggaaaacatcttcaagcgttatagacgtaccgacgatggagattgaaaaggcaaaaaagtttgaatccgcatccattgaacagttaaacatagtgcatttaactacgggtgcggatttttcggcaatctttgggttcagacctaagaatgtcaattattttgttgatataattgcgtatgaagggaagttaccgcaacagattaacccgaaaaatctgggtggctatcctatagacaagacatcggaagaatacaacagacatataaacgggctgtactatatctcagatattgcaagcccgtatcttccgactaaagaccttgttccggtagcatatacctttagttgtccttacttcaatctcgaaaactactattcaggatcaattctgatggaatggtatatacagaagcccgaagtcaccgatacgaagttaatgatcgtgtgcaatcaggccgcaagaattttaggcaggattcgatgataatttcagtttcatattattcaaagcccgattgatgaaatcttttactttcgtcatcgggcttttatcgtatatgtcccatacccgcataagttcatatggtgtaggtacatattcatcgttccagtatccaatgttccctatcgtaatgcgccggaaaccagcctctacgctgtgatatacaaagaacccagccttacccacaggggcgactttaaaaccgcgtgtagcggctttcatggcttcgtcgtgtgtcatgatagaatcacttcgcctctgtattgattgtggtagatgtatggacgaacacccagcgggtgattatctatgactaagatcaggtcaagttcgtcgtggttatcatcttctgcaactatatcccagtcggtcgctttctgttcttcaacactggcaatgaatacctggttaatctcaaccttacggtgagaacggcgaatgatcgtatccccttcgcggaacacgatcatatctgggttaatcgggcggtacgcggttttacccgcgcacacttcgtttaacatttcttcgtatgtcattctaatacctttactcgctgaacgattgtctgtttaacttctttgtattcgttgtgaagtttaggtgtcgctttgaagcgaatcacatcaccctcttcaacaattttgtttccgtagtagataaccacgttaccatctacgttgattttggtcatgaaacgttccacttcggtgtaataagaaacttgggtatatccgagagaaatcactttctcaacaaccccgctcatttccatacgcttaccgatttccccgatgtgctgcgctgctgcgatcttcgcctggcgctctgcttcccattctgcgcggatttcttcacgtttagcgatgtaatccttctccagcgctacgcccatgcagtaagagcaaatagcctgaaatactgggctatcattgccgttttctttgcactgatcagcccaccacagaatagtatacatcggcatatcagcaatcacttcgcctttacgcttaccgattggcatgatgccctgttccagcagttccaggttttcggtatcctgtacagacagtttgccgcgacgttcaaacagatcgaaatctgcgaagccctggaacaccatctggaaagtatcggtctggttcagacgatccaccatgcgatcgaagtattcacgcgctttcgcttccgctttatctgggtcagtagacaggttgcagatatagttatcagaagtgaatccacctccacgacgctctacacgcagagtgtacatagcgtttttagcgccagaagaaatgaagtatgtcgcggtaactttagtcaggttagtcatggtgaatctccttagtggtttcgtttcgataaggccaatataacaaaagccctcaaccgaagtcaagggcttttttatcatgcgttcgaatctttcataactttatgaagatggatatcaaaaattttccagtatgcttttccgcgaggataaatttttgctttatcaatgtcttcgttgcttccccatgtattgtttgggttacgacaacgattttttgcataatccatgtgccagaataagcgctgtaccgatgaatctgtgcctaatggatcttctttgctgaacagaatttgtgaactcataagaagaaacctgttcgaactactaaatcgatctgtttttccggtatcagtggcgctttatcgtcaacgttgcactgataatacatcccgacatactcatgaggaacgttggattcgctcgcccatttcaggttgtcatctgtacgcggccctaacatgaggttaacgatattgacaacgtgatcctgttctggggtattgttgcatccgttcacataatgtccgtgagcggttttgaggatttcaatgatatcttcgtcggcttcaacgagatacagccccgtgttttctgggatttcctcaagaataatcaaagcggttttcatcacacttacctttatgtttctgcttacgttttgcttctttaagtgctcgcttgcgatcgcggtgagtagaagcgcggttgaaatcatgtttcgctaccaggttgttcatcgaggatataatggcacatgatgttgaatactgacttcgccatacagttttacgatagttaagctatcagatcctttaacaattctgtatttttctggaacaacgcggtcgatttcttttttgacaaagttaagcaatccgaagtcatctatatcttttggtgctttggaaatagaagacaacgatactcgttgacgtgaatcatagtacgaagaaattacaaacatatattattttccttattggggcttttcagccccattttagataattaatccagcagtttgcggattttatccgcgatacgtccggctcgtgttgcgcttgcggtatgatcgctttctttggtagccagttcagccagcttacgctgatgttcttcttccgctgctttgcggtctgctgctacctgttcgacctgcttctgatcatgcgcaatacgcgcttccagttcggtcagggttttgtcaaaagttgctacgatttcgtctacagaacggattttggaaaacagtttcatattcattatctcaattagtatggttggaattcaaagtcaaacagatcatttagtgcgcggttgtattcagtatagttctcaccatccccgaaccgcatctgaatcgcgctttccgctattgtaccagtaagattcgagaaaccaaagaggtttttaatcttatcgtgtgcaacgaagtacagagaagcactatccagcaaggacaccatcgctgatggttcatgttcgcggcgtttgatgcgtaacagagtacggtttgcgccagtcttacggcgttgatttggggctacgtagaatcgaaatactaccttacccgttttatcatcaactaccaggtagaagccgtgttctttcaggtcaaccccttcgaacttggtgaagtcaccgcgcttcatgtcacctatcttaacagcatatttgtggatgtcaagccttgtcagaattcttttcatttttcttcaccagtttatttcctaatttggtgtttacaccagttttcatattcattgtcagtaccagcaagaagatagggcatgacaaaatcaagatcgttgcgccgaacactaagcgaactaagcgaatcaacaacgtcccgatccatttcatcggtatctctacccacttctgaaccgttgcgagtaccagcataacataacccagattaaatgcaagggctgttgcgataataccgtaaggttttttgaagtatgtctgttctccgtcttctgtacgtccagcggtaacgttgcctccgttccagagttctttggcggttttaatggctgtttctgccccgctcaagttctgccagtagtcaggaatgctctgtaggaatttcataatcgaatcctccgcgcctgaatcgctccaggcgctgttttggggttagtagtgactgaatcccacagttacatcacgcatcacctgataacggcatacacgcatcttagcgttgtcgtaatctgtcgggattgctacaacatcgcgaggattaaccttgacctgaataactttcccgcgtcctccgccatagtgaggcaggtacgattttgcggcaacatgcaaaccgcatgaacaggttcggtttttattctcgtctacctggttacgtggcatttcaaccacaacaccaggggaattatcgaacttaccggaagccagatcgcggaagtcttcacgaacacgtttccacgcgtagaaatctccatcatctgccagttcgatatcgttatgcaccatgaacccgtaaagctgatacacagcatcgcgtgaagggttttccatcaacttctcgaagaagttcaccaggtgctcgtaagggcgatcgttgtacatttcgcgaacgatacgttgtgtgataccgctgtcaaacacgatatctttgtacaggactttatgcccgatgattttaatgttgcctttgctgtaaatcttcaacgcttgcgttgtgtccaacagggtagcaactccctcgatgtcgcccttaaccattaaagcatgtgctttttcgaagttagggtgtgacgaatccgctgtgatgatcttgccgtccagtaccagagtaatgaacgattcagaaccaatcattttagatttgacatctgtttgcggaagtggtttcgacgcttccgtattatacttagaatgctgttcggtaataacgcgcccgatggttcggacgcttacaccaaattgtttagccagtgcggttttgttcgcgctggtcagaaagccctcataaactgctttcttttgtacatcatcaaggatcttaacgtttctcattatttccaccgtataaggttaatcaggttcgtcttgatcttatcgtccgtaatcatggtacggcctaaagagtaagacgaattgcgcaacacatacaccaatgcagggttgcgttcttcaaacaaatcaaaggcggtatcaacacgttctttcatatctttcagcattttgtaatgcttcaccgacatttcacgaagtaacggattgcgcaccacatttttcgatttgtttttgttctcgatagtatcgtaggtaaacttaccatcaagataatcaagcaacaaatacaattctggattatagcggtttttcaccatgcgatcaagagtcacctccagataatcgcgaagggttcgaacctcgctaccatgtttagacgaaatccaggctggataccagttaggcttcatctttttcaccgcgtcggcaaaacgctgtaccagatagtcatcaagacatttcatgttgctatcaggaatgcggctccacagggagtttcgcagaaccatcacgcctttcagtccggtaactttcaacagggtcatcatactgctggcgatgctacccagtgtatagttcggtgcttctccgtccagtcggctatattcatcaatcccgtagaggcgcatagcgtacatttcatccagtttcacgaactgtgcttttgtcaggaacagatcgtttttctgtaagttaccctgatcatcaaggaagtaatgatatgccgtaggcgttttcggacgtggttcagaatcaccagaagatgattcacgcgttgctttccagcgcttgcgatcttcggtgtacgtttcgaattctttggtcaattcactggttttcagtgtaacgatctcagattcatcgaaatagccagtttcaatcaactgacgcacagagtcacttttacgatcggcagttacgaaactgatacgatccgaaccgttcatcatgcagtaaccgatcagatacgggcggagtgaacgcgcttcgttatcattttcaacgatgaacagtttcttctgtcgccacggttggatcatgcgcataacgtcctggcgtttggtggtttccgctttatacttctcataacggcgaccagaacccacacgttcgaatacgcaatctttcccgtcatatgggttagcccagaagccccacacatattttccggttgctgtatcagggcttttgatacgcgtcagaatttcagccagcgattctttacccacacggaaacggttatcacgggttacgaatgtctgtaacaagctaggcagattattgaaccatacgagtttatcgcgggttgtcttctgctttttatactgttccatcaactcttcatcaaagcgtttgttgattttatccagtcgatccgtaatcactttcttcgtgactttatcaaggctcaactcttcacgcgacggcatgaagtccagcgatcccagagggaaatccagaatatatgcgtaattgctgttacggtagcagtagaacagcgagttttcgaacatatccagatcgattggataacaaatgttacccatacgcgcgtatacgcctgaatagttgatggacttataacggatgatcccgcgatcgtctgcttctttcggttgccagtttacatcaacctgaacaccgataaagcgcggacggatacccgtaaacggttcataaacacgcgccgcttcacgttcccattctgcgatatcttcgactttaaccggaacggtgatttgaacgccgttaggttcgtctgtttcggtttcgtagatttggtcaacgaaaggttcaccattatccatataagccgtgtacgcacgtttaacgccgtcctggatggattcgatagtgaatgtttcggtgtagcagaacggggatttactacccagtcccagcgccccgatcagttcgtcggtgtcggttttggtggattcgaaataggttgcaaacacctctttaaccatccagtcacttaaccctgtgccgtaatcacggacgatgaaacgcggatcgagaacagttggtaactgaacatcgaacgggttcatgttacccgctaccatatgaccatcaatggcgttactggagatttcgcgaatgattgcgcggatcttgtatttgtagatggttgatgacatgattttgtatgttttcgcactggtagccattttaaacttcgtgcgttcgcctttatcgaagcccgtagtgtgaatggtttgtggtgctaactgacgcaatttcattgtttatatctcacttggtgttgaagatgatgttatcacatgaatatttcataggcttttgatcaagcccatactcaacaggtgtacacatccggtcaaggtattcgtaaacctgttgcttctgacgttcgcggtctttcatatccatgataccgaccacgatagcagttacaaaacatattgcaatagtacacagcacagctattgtaatatattttcccgtttttggtgcatcatatggtttcattgaatcgcctctgcatattgttctggtgtcaatttacgcgctactaagcgccctttggttgctcgtttgtttcttgaaatgtagatgtttgcaatgttgcgtttaccttcctggatctcattgtacatcttttcggtcatattgcactgataaacttcaccgttcggagttttcaggaaaaacgcgtatatgtctttttcgctttcctgaattactgatttctcacggatacggcttttgcatggtgtaggctgtgcgcccaactcgatagctttacgctgccatacgatcccgtgtccagccccttcggtcagagcatgtgcaatttcgtgcatgagagtatctaaaacgttctcgtagatatcttccttaacgtgagaacggctcaattcaattgacttgcgactgtaattgcattgtcccagagtacgcttgaaacgtccgttgattttgaaagaccaatgagataagccatgcttcgccatgatgcttttggcccagatggttatttccatatcgctacgagttttgaacattttatatcctccccaatcagtgaggacactataacaaaaaagcctcccgcaatgcaagaggctttttgtaaattatttcaatttcttcgaaagttctttcaaatcattgagatattcagttttcggggtcgtttcttcccagtatttcagttgcttacgcagttcgttcgcttcgtcttccagcttttgacgttcatccgtggttagatgatagatgttcatcgcaaccaggatttcggcgtggttctcgcaacccgtccacgtagagacaagtttaaccgcttcgctgcgactaagccccttcaatgcgtcaggctgtgcgatcatctggtcgatgaagtcaaccttcgccagcgctttatctaacgcttccttagtctcctggatgcgtttatcaatacgctgttggtaaacaccaatacggatatcaacgaagtctttcagcaacgtttcaggacgctcgtatgaatgcagtttcccgttaaagataacgttgatgtttgggtttgagttctcaatcaatccgaaatctttcaggatcttctcaggggtaagcccgtttgcatactcgcgtttgagggtgatctcgtagcggaaatcttctttcgatagatccttatagcttacgatataccctttctcttccagcttatccagaatagaaatatatttcacgcgatcatacttgaccggaatctctgtgatcaccagtttagttttaccctggagttcatacttgccatacatcgtaccgttttcaatgtcacctttgaaatgcgggtatttcagatccagtgtgaaatctttcccgttcaggtaactaacacatccattcagaaccgaaatcggatcgtgtggtggaatgttggtagcgtatgctttcgcgatcccgctgaacccgttaaccagtaccatcggaatgattggcaggtaataggctggcggtacgtgttcaggatcttcatgcgggattgtcaaatcttcatccatgtagatagccttgaacagcggagacagcttacatttaatgtaacgcggtgcgcctggctttttaaccagacgggaaccaaagaacccatcgcggtcaaaaagcgggatgttattgcaccagtgcgccgccataagagacaatgcctcttcaacggatgtttccccgtggtgataaccatacattgcaacaccgccagcgatagaggctactttctggaagcctgtaccgcctttcgctgcggaatgcacgaagaaacggtgaacgggtttgaacccgtctaccaggtgcgggatcgcacgagaataaattgtgtaaagggcaaacgtaagcccttctacctgtacaacgtctttaatacttctttccatcatttcaccgaaaatttatgttttccgttcacccagtctttacgcggatcggattcatcaccgaaacacagttccagaacgtctttgtattcgtcgcccagtacgattgtatcgtattttaactggtcgcccaacacccgatcgtaatcttctttgcgtaaagaacccagccctttgatatatcgcacctctttcgctttatcgcggaacggtgcgaaatcttcaagggagtagaaccatttttcatctttaccgactttcgcaatgataatcggtgtgcggatataacggatctttttcttctcgaacaactcaggccagcgactaaagaacgcaatcagtagggtgagaatatcgcccccgtcaacgtccgcatcgaccatgatcccgatgttgtcgtaagtcatttcggaagagtcgcctggatggagattcaggatcgccatgagttcagacaattctttgtttttgagcacttctaagttactcattccccaggtgttcaacggtttgccacgtagcggaaatgcgccttgtgtctcttcgtttctgcactcgataaactgccctacagcggaatcgccctcggtcagaaacaaagtggtttctaccccgtcagtgtcgatccctgatgccggaacatgttttgcaaccttcgcctttttcgctttcttcttcgctttggtaatggctgcggcttctgctgcctgtttgcgaatcagagcggactcaatgatcggagtgattatttcagaagtatccataatctgtttcgcgatctttttgtagttcagtccggcgtggttgttgaactccccagcggtgttagtcagtttttctttcgtctgactatcaaaagctggtgcattgaagttatgcaaaaacacaaccaaagtcaagcattcttttacacgggctttcgggatctcgatagcgtgtgttttcttgatcatcggttcgagttcggaatagataccgtcgatcatggtgtcaacatgaacaccgccgtttttcgtatccaatccgttaacgaaggatttctgtttgaaaccgtcttctgtgctcgccaggatgaaactgattttgttgtttgtctgggtaatcgttttatcaccgtacatcgcgccatacatcgcgaatttgttcgggaggatatcaccgttatatgtgaatttaacggcagggaaagccactgcaagcgccataaggcgatctttgatgacttcctttgtctcttcgtcgataccgtccacaccgaaaatagagaagtcaggggtaaacttaacggttgtcccttgctccttcgtcgggctggtgcggtaatccatgttctgcgctccgtccgtacagttgatcgtgactttgcgtttaccgttggatgtctcaccgataaagattgcgctgtaacagtttgtcaggaaagaaccaacaccgttcatccccattgttacacggttttcgtcatcgaagttagaaccggatttagccattgtccaggctgcaacaggtttaggaacaatcttcccttctggcgttctcacgtcatcttgtggaataccgcgcccgttgtccgaaatagtaaccagattgtgatcaatcttgacttcgattttgttcgcaaatttgaaatcagttcggatcgcttcgtcgatggagttatccaggatttcgttgatgattttcaccaacccttcaacgtattccactttgcggaatttacccatgataaaacgttcatgggcttctttgttcactgaacccacgtacatgttcggacgtttgcgaatgtgatcgcgatcgctcaagcagaatgattcatccaccttagcgccctttgtcggggcttctggtgctttctgcggctcgttatcgtccattaagaaatctaaactcatattcacctctttattagttctcaggcattatatagggttctatgaaaaagaaaacccctttcggggtttacttgttgtacgggaaaccgtctttcaccatctgcggcttatcaaccgttcgtttcgcctcgcccccgcaatcacaatctttcggttcgtcacggctcgcgatgctggacatcttcgggaattctttttcgcacttggtgcatttataggtatatgttggcattaataaatctctgacaatggaataaaacggatcggggttgcggctttgctgaaaacacattgtttgttccctgcaaacatgagatcagtttcgtacaccatacagatatatccctgattctccaaaatttgccgctcccagctatcgaaccatttagacaacttctgcaatgaagagaagccgaaaatatagctacgataatttttaccatgttttttgaggttacgcattaaacgaaggtcttcgcatggtgcggggtgacgagtctcggagataccgaagtttaaaccgaactcgattccatgaatatcaagatactcatagagatcgtcttcatcaccaacacaacccgtgtacgggcctaattgcttacaccatccatcatatttggataatatagacgctttcaattcaacgcgataaaccaacatgatccgatcctcgtaattgattaactacaagtagagtaccacttatctaatttcttatcaagcagtttattgatcacttgcgcgatttctgttgtcccgtgggtagtacccagtttcaggtaaatcacatccaacgcacacacgatcgcatcaacgctttcttcgacgatatcaccgccgcgttgaggctgaacgagacattcggagatctccccaacctctgcggacaggtggtgaaccacgtcgctaacggttcgttttttgacgctatgagcggtcttgaaaaacttatccagaactacagcggaattttcgcgcggtacttcctcacctttattgacgtggttgatttcagtttccggttctggtgcaacccataccggattgaaaagccctttcatatcgttgaacttgataggaacgggaataccttcaagataaagaatccctgtttcttcatacaccatactgatccggcgtggtgaattgaagtccatcgggttcttacgcaacgcatcatacatacgacgaatcggatcggcttctgatgccatttgacacacagccattaaaatagatttcggggcgtacatatcaccaattttatacttgctcatttacaatacctttatgataaccaacaataaaacagttcacttctggacgttcgccagggaaatgcacacattgcatgacgcgttcagccatgagttcttcgcccaaataaacagaggtggtttcttcgttgtagtgacaacagtaagaagttttaacactcataccaggcaatccggcgatatgcataaactttgagttcgtgcatggtttaccctcaatgctctttccgtttacatcaaacgttgcaaacatttcggttttgctgttctttgggcgtctgctcatttattcacaacctcattatatgttttcaggttccattcatgcacttctggcactttggagtaatgatccaggaatactaactggacttgcataacactagcacgatccatattgaaaaggaagcgttgcggggaagtaatacacaggaaatcttcggtacttcctctgcttgcgctaaactcttttgtttctccgccgtcaaatttagcatatacaggcgtagaaaaatacggggcgaatagttcgcgtttggaatcgtccgtaatcgcactgaaacacacgtctacgagctttccggttccttcccgtctgatggtgagcattgtccctttcgtgcgccctaagacgtttacagagcgcgtagtgacatcaccaaaagcgtttgtgtaactcacagtctccacaaagcccatatcacgacgctgttgtagcattgcttcgtgttgtgcttctgcatcctgttctactactcgttgtgcggcttcatacgccgctttgttcggatctcttgattgccatgcgaagaataaaacccctgcggctatcagtccgaagattgaccaactggcggttgctgatagtttcattttaatttccaaaggggacgaagccccgattttagcgaagatagcgaacgtatccactccggtcgatcgcgttctctgggttgttgaagatgttaccacgaatacccttagcaggtgctttccagccagcggctttcaagatatttccgtcattgtcgatgaagccagcaactgaacgctgattgaacatttcacccgtttctttgttgcgggtatcctgcacgatacggtgatacttacggcctttttccagaacgaacacagtttcagtgtaatcgctgaaccacatgccagtgttacgacctttgtgcatcgcgtccagtaaaggctgtgctgcggctttcagttcgtcaaaagtatacatggtaaaatctcctaagtgtgtttcgtttcgatgtgtgtaatatactattatgcgttcaggattgcaagcattattttggttgttcgcaaatattgctcaatgcatcgcgtttaatgaacttcaatacacctgctttagcttctttctcgtcttttgcctgatacaagaagcagtcttcaccatttttagttttgacggtaatcacgaaagttttgtagttcatgcgtagttctccaggttagccagattttcttctgctttagcaagggatttttctgcggcttttttcactgctgcatactctttcttttcccatgctgcgatatcgctgttcatcttctcgtcgcaataggcgatgatgcctttgttgtcgttgatctgctgaatcaggaatttgccgtgacctttgattaaagaaccgttctgcatcatgataactctccttccgttttgtttcgatgggataactatatcaaagctatcccgtgaagtctttagcaaaaagtgctatttgttaaacccgtttcccttgataccatttcgggaaaataaccctctcgataaaagttctccccaggttgaaactatcaccaaacaggaggacaccaaacaaaggatcgcgcttgatatcgtttttcccgacagtcttcattttcccttcgtggatcacggtgtcaccaaccgtgatatccttgatgcttacttttacatgatgcatacaatcacctctgcgagtttagcaggttttgcttctggtctaactttcaacgcatcattcagattcttttcaaccatcgctactgcgtctttttcattgaacccgttcttaaccaggactttaactactttggcttctaagtttttcatgatgcgttccttttgtctgtttcgtttcgatgtgtgtaatatacaaaaaagcctcctgcattgcaagaggctagtttaacaaaaagtgctattttaatgatttaagtgttctacggattcccccgttttgggtgatatcgtaaagctcttttgctttggaaagagataccgtgatgtcataatcggttcccttctgtgagaatgagaatctaacctggtttagctccgtgtatacgtgggtacacactgcttccattcgaaaatgttttataaacgctttcttcgtgtagtagtcgctaaaccattctcttgctatggattggtcgattgctttgaagatgacaaacagcacaaccaacacaaaaattactataagtggaattgctgtgctcattatttgcccctgttcacagattgacggtgtaacgcacggttaacgcgtggcgcttgataaggtttcattttgtacggtgttggatcagagtattcgatccggttaggtaatgaatacagttcaacgcttggttgaatccagcggattgagtcgattaacccttgagttaacgcacgaccgaaacctacaccaactaaacataaacgcataatatccccttactgtgccagaatgtgaagccattcgcccaaccacacgatcgcctgataagacaaccacaccgcaccggacacacaagcaatcacaccaatgatcgcgaatccgattaaaatgttcaaaccttctttcaaatcaccaaacatgttttatcctcttttgtttcagtccctacaaaataacaaagcccttgcacgaatgcaagggctttttatcataattcgactaactgaggcaatttcagaaccatccccggaaggatatagcttgcattgctaacggttttgcggttcaacttagcgatagactgccagcgctcaccacaaccgtataatttttcagcgattgaatacatgctatcgccaggctgaacaacatattcatcgtattcgactttaacgaacgcggggttcatgagaatgtcaaacatctgcgctttcgcttcgttcagtgtttttgcatgtacagttttacctacaaatgataatttaatcatcttttcctcggcagactcaatggatcggtttcttcttcacttgggggttcttccagccccagcgcatatctcaatgaatagactatcatcaaaacatctttcgcgcaatcgtgaattgaattatgcatcacaaaaccatcaagcaaccctttccgaagaggacaggtcgaagcatcacgcgttaacaggcggttttcgatacatgtacgcacatcgcgactattccagaacacggtcggcatatcttcgaagatgtcgatcttaccaaccatcttacgcacgatatcaaccaggataccgcgatcgaattcaggaccacgaacataatcgagtgattgccaacggctcacaccgtccgctttcaggtcttcaaagaattgtctgtgtcctgcatacagttccagatcttccggcgacggtttcaggatttgacgggcttcttcgctttgttgtttccaccaggcaattgttccctgatcagcaatacgatcaggctggttgcgcaaatcaaatttgtacttgcgcccccgtgcaaccagttccgcgaacgttggcgggttgtggggatcgtcaacaaatggaacgtatgagagttcgatcaccttcccattcggggaaggaccaaccgtttcataatcccatacgtaatctacgggtaaatgactcatgaagttctccgcttatactcttccatgaagtacgccagcgtaagcgcaacttctgggttgatatcaaaagtttcaaactctttgctttgcaaagtcatcataccgaactgacgcagaccggaatgataaattgccttttccagacggttcgcgttttcaacagcttctgtgaattcgtccaacacatcgcgatcgatgaaatgcggaagttcttgaacaggggttttgaaaattagatctgcaatcgcttccgcgtggaggcgtgggatctggatagatatatcttttttcatgatattaatgtccatatgtctttatcttcacgaatgtttcgtgccattcgaaggatcagcacgataacgccatattcatcataagtcagttcgacttcttttgcaataggactccatgaataacttggtccgttcggagaatacagaatatcgttagatttttcaatgaagcgcaaacggtgaataacttcttgcggatctgctgcgctatacatcccgaacacattgaccgcatgtggatctttttctcgaattttatcgagtgcttcaagaattcggggaatgtcttttacaaggatagtcaatttcataataacctcaaaaggggcaaagccccttatacataatcaacggtgtaacgtgcgcgggttacgcccacatagattaactgcttacacagatcgtaatctgcgaacgcatacgcatcgcgcgtgtacatgtacgcatggtcatacgtgctcccctgcgatttgtggtacgtgcaaaccggaagaggcttaacatcctggaacttgtttttaatcgcccagaacgaatgccacggggctttatagcctgtttgctgcttgatgcgcttataagtgctcgcaacgtaggccagatagttacccagacggtctttcatcaccggatcaacaacaacctgaatctgtgcttcggtttcctcttcgagcgataccgttttcagaagatagaattcaagttcgatcttctcgtcgcacttctccgccttgataacttcccgacgcgggatgatttctaagactcggattttttcgttgttgttataaacaatctcggtgaagatttgcccgttcaaccgcatttcctgaactaacggttcctgcatcacgatcacttcatcgagaatgaaaggttctgttgttttgtacaggtgtttacggatcgttgcgttcagcttgtccacgttgtcgttagtgtaagcgaacatgcggttctcgatcaagtcatccggcgttttgacacggcggaaatactgacggaggaagtcaacagcgttagcatgttggaacacacccagatcaccgacagacatcggtttcagcatcttaccatcacgtacagcccttgaaacctgaataatcgggttcccttctgcctgacgcatgattttatccatacggataacatcaaagatttcttcatcaaagaacggggagagttcaacacgtccatcggcgtttaccggacggatctgatctttatcacccagtcccagaataacagcgttgcttggaatactgcgccggatgattcggaacagatccatatcaaccatcgagacttcttcaacaacgaacacgcgacaggtagacagatcaggcgctttcttgcctttctgctgttcgaacacacgaagttcttcgttagtcacagggctaatcttcaatgcagaatgaatcgttgttgcgtccattccggtagccgctgctaacacgtttttagcctggtgtgttggggcagttaaccaaataccgctaatccccaaccctttcagagtgttaaagacaaacttaaccagtgttgttttaccaacaccagggccacccgtaatagttgtatgaatggcgttctggatgttgtggatcacgcgatcatgcgcggacttctgatcgtcgctcagatcatcaaatgttaactcgctcataatttgagtaataccccttgaattttcgaattctcaataaaccaacgcatctcttttttctgttcttcggttgctggtagttgctcggttttgcggaagaaactgaaacgcggttcgtccggcgtgtagttcagtttggtttcgtagcacttgcggataaaatctaatttatcttttgcaagttgcggtgatgcaaacagttccggcgttttcccgttttcaacgtatggaatagtaaagccgtctttgtctttcgtaacaatgatatagtatttgtcaatcattttcgcccctcatagatgacgtagaaaaaacctataacccatagcaatgataatactatcaaagcggcttttctgtcaacaccgttaacgtggaaaacgcaccatccaaagagatacgttatcaccgcgcaaacgatataagacaaagcaaatacggcatgtagcgcggtgagttccattagtagttgttagcccaacgacgcaggttttccgcctgtttcagagcatacagcttgtagatggtttccgcatccagtcccagcgcgaggaacttacacatgaagaagtgccactggtcaatcagttcaaacaggatttccagcttgtcttcttctttcatttctgcgaatacctggctacgcagttcctggtgatttgctttccacggtttccagacaccggaagccgcttttgcaccgcgagacataccgcccagagcggtgtaaagttcgcgggtttcgtctgcgatcgcatcatcttgcagtttcagccagtccaggatctcaccgcacgttttcagttcgttcggacgtggaacccaattcagggtatcagacaggctttgttgtgcatggttttgcaagtccagcatcttttgcagcgggtcaattccgttctgtaatgcattgcggtagaaaccttctaccatttccagatcatcggctttaaccaggtgcgcacagctattaaacacaggagttttatcagtcatatcaatctcattttttcggtgatttgttccacgacttaaaccgaagtttcgccgtgagtccagaaacagtattatctttcaaatactgcatgatttcaagtttagttgcgccgtccgtttttatcatttcgttgatatcttttgacggccacgggcatttgtcccacaacacaaccttttcgccagcctcaatcaattttaaaaggcggtgagtagtatcagggtgtctcgcttcattgtcaagaacccagacacgcatatttttatacggaacatcggacagcgccatttgtccgcccgtaatcgcaccagcattatctacaaacaggctatccagcggcccttcaagcaggtagacaggtttcaacggatcgatggtatcttgaccatacactttcgttgagtgttcacatgctttgattgtcatgtattttgcgttggcattgtcacgcaaggcgcgtccctggaatgactcgattttacccttttcatcaaagatagggatcaccaaacgcggttcatccttcggtaaagggtatgcgtccgcattcacagagttaaccaggtgttgccattgacgcgtaaaccagaggcgatcatatttgtctttaggtatgtgacgacctgcaacatacttaacgatagggtgattttctggcaacgtgtccagacgttcgcagaactgcaattcaggaatatatttcttttcttccttcggcggttcttcgtgcgtctgttttaaatctttacgatccttgaaagattccatcaaatacgccgtgtaatcatccgggtaatagtctttcagaaacacagaaaacggcttgctgtagttgcagttaaaacaaccacacatcatgtgtgtgcctcgttttgacgggaatatccagaaacgttttttgtgcttatccttcatggagtcgccacaaatcggacaacgggaatggatactgaattccccaccccgtcgaacgatttcgctttgtggtaatgatcccatgatacgagttgcgaactctatatcaagatacatgtttacctctatcggctaacttctttctctgtgccgtctaaagtgattttccattcatagaatatcttataaaacggataaggtctaggaatatcgacacccgatgatgtttttctttcgttcgtgtacacgatcgctgtgtcgctcatgtacttgatacggataggaaaccaggtgtaattgttcgcagtaacccagatccgataattcagaggcggtaatggtttcattcttcactcttcatgattttacgtttgcgtttatgcggacgcgtagaacccagaaccttcggccctttgttcgtgatcgcgcctgtagtcacacccgaagcaatattatccacgcttccgcctgaatcacctgcaaccatttcttcgttgagtctttcgcgaagttctgggaggttcatcatgatctcttcgtgctcttgctcggtcaggttccagcggttccgtaacgagtcatacgcgctcgtaaggttcatgaacccagacatataaggaaccgcgtttaaacggcgcttgatgtgtctcacagagcgatggaatggggaatatgcttccagttcttccttcgtcttcgggttcttgattacttccccttgaccgtcgatgatacccagcttgtaagccgtccattcagtccagggctttttcagtaggcgaatcattcgcacactgtaggttaaatccatgtttttgattaattgatcgctcatagtctttactctattgtgaaagtgaaaaggttttgcgcgggtttggtttctggttcagggaattccatacagacaacttcacacatcggtttcacgcctttccattcttccagataatatccggtatcaatgccgcaacctggttgcatttcaaggccagtttcatcaagaaactttttgcatttcgatgttgtcgttgattcgtcctgttggaaatatcgttctccagagtaacgaaaattcgcggacatctgcgggagaatgaacgtacccgcacgggcaatctgtgaagcacgttcaatcactttatattcaaattccgcgcccgtatacttacccttaaaatcggatgtctttatcttgccgaaaggtggattgctgatcgccatatcaaacagagtatcaaactccgtcgttaacgcgtctgcgttaatccaggtcgcttccggtacgatacgcttacccaacttatagtatgtatggtttaactcaacacagacgatttcacgcggtttggcgtacatcatcatatgaagcatcgcgaaggatagcccaccgatacccgcgcacaggtcaacaacgcttccactggtacaagcatcaatggtgaaatcgcgagcaagtccgatcggggtaaagaatgcacccagttcagagttattcgtaaatgcaccttcatggaagttttcgataatgaataatttttcgtcgtaggttagcgccttgtcagactccaccagatccattatcttgttgtgttgtttggtttccgctttcgttaacttcgccattgaccttttccggtaataagaacagaggggtagattctaccacatcaaagccccagtcatcaacaatattgctttcccagtcgcgggtttcccacgggctacaaatccacttatacaccccagcaggatcttcaacctgttcaggcatacccagcatttccgcattgataccttcgtccaggtagccaggatgaatattaggccagcgcatgatatcgacatagcctttatcgtcaaccgatacgatccattctgaacgatacgggctttcgaactcctgttcttcgtctggaagaatcatatctaataaatcactcatttcactaaaccttctttaacgccctctttcatggctttcagaacaccgataaaagcgtctttgccaccgatagcgccgatgataagcatcaggacaccaacacaacccgctaaaccgattctgaacaggttccaggcaaacgggatagccagaagcactaaccacgggaacggaaagcccataagtgcgtttagaaccagtaagataaaagcgattgcgagtttcatgatgtcctcctttgtttgtttagaataaggtatcacctttcgagaaggattgcaatacctacagatacaaaaaagcccctttcggggcttaatttttatgctttgttgattaaataccgaagaacgtttttggcctgaacttcgttacagcagagtttgaattctgggtcgattgggaggaagccccagaggaaatcaacactaccttcaacatctactttcccacttttcagcatttcaaccagtaaacctctgtttactacgctgttcactactgcatcgaaataacccgcgctgaaatccagttctgggttcatcacttcgtcgtatgggttgttcagtacgttcatttggtatctcctaatcagtttttgttgtctacgggagtcatattatcacaatcataactcccgtcaacccctaatcaggattattttgcgttttttgcaatccagagagtcagtttagggaatacgtttgccattgccaccacaaacagcacccagaaagccagcttaatcacaccgatcacgattagaggtgcaaacacaagccaccatgaagcatttgccataaccccgattgctgccagtttcagagacaggaggatcaggaatacaataacgagaatctttttcatttcactatacctttgattggggccgaagccccgttaaaattgaatgtctgtactatttgcaatttcggctaacttattgcttcggttagtctcagcttgttttaccatagcaccttgtgcttcttcaacagttttcggcatctgacgacctttataatcagatttgaacccgatatcgctgttgtcggtatccatccagcgttgattacccttacgcacttcgagtttgaagtggttaaagtggttcttatcgccgtaacgggatttgatctgcttgaacaactgcaagccctgatcagctaactcgtcggtctcaatcacagctaacataaagtcagcagtagccggaagaccagcagattcggcaacgtcgcccatgctgatatcagaagcatcccacgcggcgcgggtagtctgcgcaccagtccacattacggtatttgtttcaacagccaaaccgcgaagttcttcggcaatcgctttaaccaggatgtatgtgttttccgccccgcgtacacgggtagaagcacagatccccaggtagtcaacaataatcacatcaggtacgaaacccttcttcaatttaagctctttaatcagcgctttgaagtggttagcgttcgcccctgctgttgggtattgcttaacgattaaacgcccgaccttcgactgtttgaggcgttccatacggttcttatagtccgcataggtgatgttcccgttgtcgatatcgtccagtggcacatcaagcaggttagcgtcaatacgtttagaacaaacgtgttcagccatttccatactgatatacaggacgtttttacctgattgcaggtaatcagcagcgagagaacaaagccccagagatttaccaacgttaacaccagccattaagatgttcaatgttccacgttctgcgccgcctttggtaatggcgttcaggatcgggatattgaaagcaatcttcatcgctttggactggtaaagcatccagcgtttttcatagtcttcgaagtaatcatgaccgaccgaactatcgaagctaatcgctaacgcttccgtcatgatgtcagggattgccccaacgtcagggattttgttgttgcgttcgccagcaggtttttcagcattcgcctggatctcaattgcacgggacagagcgcgatacattgccttgtcacgacaataggtttccgtttctttcatcaaccattccagatcttccggcgcatttttcatgctgcggatcatctttttggtatcttcgtagactacatcactcaggctctttttgtccagagctacttctaaagcagtttgtgaaggaatgctgttgaattcctgtacgtgcttatccatcaaatcaaagagaatctgcgcgttcccttcgaaatattcacggcgtaaatggggccacgcctgaacaaaatacgtaccattaaaaaccagatttgaaaatattgtttcgacgatcattattacctcttaaaccagattagcgaacatctgaaagaaattatacagctttactttcaacgccgcccataaggtcttttcaggctttgggagattgggcttgatctgcgcgtagattgcatcgtgaaccagcggaatcagtttttctttgtcttcgtccggcgtactaaattcgactttcaggccgttatcccaatacaccttatggatgtacactaagtgtgcaacatcgttttcatcgttgatcaacagttcttgaataacgtcctgcattgcttcatcaagaatgttttttgttttttgttcaatgtccatgattcacctattaaaagggggcaaagcccccagttgtttattactcttctgacatatccacatcatcagggatatcgtcatcgagatcaaatttatttgacggttctactacatcgtcggaataaagatcttcgagtgctgccccgtcagtgatctctttgtcaggaatacggtacttatcctgaatggcatcaaggaatggctggtgagtgaacagaggtttccagaactcgatcgagttggtttccgattcacgccatttcttttcttccagttcaagttcgcccgtttccgtgttcaggaacgcacgaccgcgccagcctttcgttggagtctgaacgaagttcatttccatagccagatccagaagaccagagaacatactgataccgccctcataggtaacatgaagcgggaatttggatttctctttcacgaagcgagatttctcgatattcatgatgaagtcataaccgacaacttccgtaccttctttcacctgctgtttgcccaggatgatcgcggtatctgcggaatacatcagaccagtaccaccggaaatgactttcttactgtacatttcttgtgtgtcgtatgtgtgacagatacacaccattggaatatccagatccgccaggtaaggcgtaaccatacggaacatacctttaagtgctttagcgcgggtcatgtcctgtttgtcgttgtcagacagggcatcagccagttcttttttactcgcggtgttgcctacagagtccacgaaaatgatcactttgtcgccacgttccagcgcgttaagctggctcacaacgtcatttcgaagttgctcaactgtcgtgatacgagtatacaccacacgatcggggtcaacgcccattgatttcaggtaagacttagttacgcctttctctgaatcgtagaacagacacacagcatcctcattcgctttgaggtacgccgcaaccgtcaccagccccagattcgatttaaagtgttttgacggaccagcaaacagagttaagccggaagtcagaccaccatcgaaagcgccggacagcgccaggttcaggatcggtacacgggttcgagttttggtgatgttattgaaaacatcgctttcagacagaattgacgcagattgactattcgagtttttgatcagttttttcaggagtgctttattagacatttatttttccggtttatatacacgcataatatcttcctcacaaatttatataaatggggcatttctgccccgtcaggtcttaccagtcatcaccaaacagagtgttcagggatgcgcgtttttcgtaatcaattttacatgcttccgtgatgttttgcaacggactaatcacatgtttttcaaacaatccgccgtagtctacccacttcaaaatatcttcttcgatctcagttggtaaacgtgtaccggattgccatgcgatgcaatcagcttgccacgggtttttatctcgcaacggcagaaccatcaccttttcaccttccatgatcggggtgattccttgaatacccttcgtatggcggttaaagaacagaacgcctttgatgtggtttggtgtccctttgattgggaagccagcaccatcattatattttgagatattattagcagatgatacaccagctatttcgcggtagtcaagcgccttatactcttcttcaaatactttgaagtgttcgtgtaaggattcttcaccttcttgcaggatgcgacggatcgcttctttcaagaactttttaaccgctgtcggtgtactacttcgctgggtttccattcccatgatctttaatttaggtttctcgtagcgggttccttcggagtcccatacgttagccgcatatcgtttcttagccgtccagaaactacccagacctttcgatcccagaggtggtccagaaatgatttcgcgatccataaacatcaggtgttcgacgttgttcatgtactcgcacagttcgcggtagcccttatcaatgataggttccatgcgttctttactgaacttatccaggaagtcaacccaatggttgttatccctgaacttattttcaccgccgactttcgcgatcacgttgtccatacaaacataaatggagtcggtgtcacagtaacgcacgtatgcgtaatccgtggtgttgcacagttcgttaaggtattcgttaaccttacgctcaatccactgaatagccaactgcccgaacatggtgatcgcactggcgtttcgaatatcgaagtaacggaaatgttcgttacccaacgcaccataaagggagttgatactgattttacggttaagctgtgcggtgttcgcctgtgcgattttcttctcacacactttcttcacggctttaagcatttgcttagacagcgttttcagtacagcttttgattcatcaccgaaatcttcgtagaactcgaaatcagggttgatcatttggttgtgcgcgtctgtcaggtgttcgagttcgtgcttaatcagttcgagatttcgctcacccgccatcattcgttttttccacgtcttacgctgatcaaatactttcttgatctcgaccggaatcacgcctttaacatcgcgtcggaacatccacccgttaggagagcagctaaattcgtcgctaggacgcggcgcagtcttattgatgtattcatgcatcggacgcactgcaaagctgttagcgattgtctcagggcttatattcacctgtcggatgatagatggatacagactggtcaagtcgaacgatacaatgtaacggtatggagcgacaacaggatctttaacgtatgcaccatcatacggcgttttagtatggcgtttgttttctgggattactttcttctcttcacgcagagagttgtaaatgattgcgtcccacgttttaagcggtgacataaccccagggaaattgattttcgcgtagtatgctacagacagaaccagttcgataaagttgcgtttaccgtcgatatccaacacgcggataacgtcaacgatgttatacgtgatgtatttctggtgatccgcttgacgcagttcagacagcgaaccttcgtaatcaactttgcttttacctgtttcgaactcagcgatcgcgcccagagcgtaagttggttgcggggtgaaactgaatttcttatagagatccattccatccatttgagcaacgccgtaaatctcatagcccagttgttcgttcccgtaatggtcggttgttgtcttcgcagtcactttcccgaacgggctgaaatgacgaacaacgttttgcccgaagatattcaggtaacgggtgatgatatacgcgatatcgaacttgtttgagttccatcccgtaacaataacaggtgtccgctctttccagtctttgatataagccgacatcagcgacttttcggtctggaatgaacggtaaacaattttcttcaagtcttcttcgctgatctcgttttcggtatcaacttttgacgctacccattcatctaaaccaccctcgacaagatcgtacacaaagaatttatcttcaacgctgtcatagtgggtgattgcgtcgatagcgtattttgcttcgcgtggatcagggaattcaggcgcggtaacttcgatatcaagtgaagcaatgcggatcttgtcgcgatcgtattcgatttcctttctgtaggaatcggagatatacgccagcctgaaatcatccatgcctagcgcttccatgcctacatctttcattcgctgcatccagttttttgcttccttgatgctttcgaagttctttttgatgcaggtcttgccgtaaatgtcgcgatatggcgagtctacacccgccatagcgtgttgaaacattgtaggcgcatattttgttttgcgaacctgttcgcgtccctcagagtcaatgaagcgctcgtagatgtgatcgcccatttgctcaacggatagataaaattcattcattacggttttctttctccgtgtttaatcgtgacaggaatgataccccagccagcttgatcagatcaagcgagcgttgcgctaatttgtgatagcgttgggtgtcaggccgatttagttgttcaaccagcacggtatattcttccatgatgcgggtatagaacttagggaagtgatcccgcgcgtatgcgtaggtgcgcagatcagagagattgcaagtaagagacagtttgatgtcttcgctatgcagacggttgatcaagtgatcaccggattcaatagctttgatgatttcttcaatacgaattttcataatttagtcctcacaagtggtgtacaaccaatataacaaagcccctgcatttctgcaagggcttttgattaatgtccgatccggtacttgtatttcaaagtccattcagctttttgtgcgtgagtcaatacgcggaagttgttctcttcggagaatttcagatccggcgtaaggatggaaaccataccccactcttccagaagtcgcgcaatgttattgcggcgcagttcgtcatcttcggtcatgtcaacctggcgaccgtccagcttcaacagttctttgaagtgtacgataaaataacgcccttgtttctgtaggatgtggcaagactgccacagcattttctttttgttatttgcgatcccgatacgggtcagcgtttcgcgaattttcaggaaactgtcatcgctggacagtttaatttcgagcatgttcatacatcaccatttctttattagttgttcaacctttttctggtcggttttatttttcacaacatcagccaacacagataaagcaactttcatatttttccgcttccactcgtccagtttttcaagctgtttgagttcttcgtaatattccattgctatacgtgtatttacaccgtatcgtttttggagaacatgaaggataactttcatttcgttatcttcggtgagtttagcccacgccccgaaccgcttacctttgcgcaccgtatgcaggtaataatcaaagtgcgcctggtctggtaaaccggaaccgatcatattcatcgtgtatgcaggtatcagcgtttcgatatgctggctcatcgcattgtcgatgaaaaacttatcgtatgaatcaagggcagagatccgtaatggtgtcttcccgttgttcagttcttcgagcaccataaacaaggtgttttccttgtctttggtgtactctttcacaagttcttcgatcttgtcccagtctttagaacgccaggccgcttcatgttcgttcagttcttcttcatcgagaaaagcagccagtgacattttaagcctcccacgcgagggtaagcattaagcccatgaacaggtattgcaggtgaatctctttgttcactgccagcccgtactgtgcgttgttttcgcctactgcctgaatgagtgcaaccttagattcgttggtgacgatcgggtataccgcatccagaagtttagccaggaaagtttcatactcaggcgcgtacttgattgcttcggctcgcagtgctttgaagttcttcgctttaagcccctcaatcactggtgtgatgtccgaaccaacaatctcagacagaataccagcatcaattttgccacgcttagaatagaacccaagagctttaacgatggatcgcgcgtctgggtagtgcttcttaacgaatccggcgatcacctgctggtcatattcgattttctcgatttcgaggataccgaaacaacgtttgatcatttgcttcatcagttcaacgcgttcttccttcgacggggaaccgaacttgactaccggacaacgggagatcagcgcagggtgaatcccgttgatgttgttcgcggtgatgataacagtaacgttcttgctgtacgcttcgataaagctacgcatgtgcttctgtgcttctgccatgccagggcgatcgaattcgtcaatcagaatgattttaccgcctttcttctgcgtcatagaggacgcgtaacgatccagttcgttacggatgaagttcacaccacaatcggaaccgttgacaaacatcacttccgcatcaacttcgttagccagaaccagcgccagcgttgttttacccgtacctggggaatcagaaaccagagtcatgttgtcgatgcgtccagacttgatgaagccgcgcatcgtcgctttatcagcagcagggagaatgcattcatcgatcgtcgtcgggcgatagcgctgatcccatgcgaattcttcgggagactgggagattttgccgtatttggtttcgattaactgtacgttttcactaagttccataatattaccttcaattgattatcaaaaaggggcttaacgccccttgtgtactactttgtttatcttacttgaactggctggttgcttcaagtaccactacatacgcaacgccgttttcggacgagaatttcgcagcgccgcgagaagagatttcaactttgtaatcgctgttgatgaactgcatgttgtcaatcttcatatcgaagttgaacatgttatcaccttcgtaatcgcccacttctacagagaaggttgactggctttctttacttttcgcggtgattaccagcttaccgttgattggctcaacagacaggtcggtcagtttcatcatgcgtgacgctttgatcagtttttcgaaatcgttcgcgctaatctggaaaatcagatccgcaactggcatttccagacgcttcttaggctgtacgattgtggttggatcgcttgaacgctcaacgattttcattttctcaccacgaatgacgatttcgccagtggacagatcgtgagttacttcggcatcagtgcctacaacgttcagcatgttcaggaatgagttcagatcgtagatacctacatcttcgtcaattacgtcagaaatcgttgcttctgcgtaaactacgctgttaatggatttcgtcataatgaacgaaccctttttcagcattacagatgggttgatctgggagaagtttttcaggatgtcgatcgtttgtttagagaatttcatattcaacctatagttttcaattaggcaaaagtgccgttaatcagggattctacaacgcgatccgccgcattgtcaaggaattctttgcttttggattctgtgattttcgtacccgcttcgcgagcgtcgtgaatcagtccggtatgtactgcgcttactgcttcgtcgatccgtttgtaatgctcaaagcgttcagcttgaggcatcgcacggaaaatctctttgatgttttccggcactttacctacccaggatttgcgaacgttgttcagatgcgctacatatacgttttgttctaaattcatatctacctcaaactttcaaaattgggggctttcgcccccgtaagcattacagatccagcagtttatccaggtcgtcatcaccggaaccaccttccaggtcaaacggaggtgtattatcatcttccggtacgcttccgcctacgttcagttgacttacgccaccagattctttagcaccgttggaatggttgccattatcgaagtttttcagttcgttgtcaaatgagttcagttctgaatccagatccacaccagcgcttgcgccagcacccattgcagcaccaccgaatactttggtgaacttcgcggtcagttccgcagttggtttgaactggtctggagcagtgattggacgcagatcgctcataccttcgaagatttctttctgacgcgcttcgtcttcgatgcctttgattgggccaggaacaccaaatttgctgtcgtcgtagttaggccagtcgcctactttcttcgcggtcagggtgaagttagcgccaccaaacggacaggttacagcaacacctggttcatccagatctgggttccccgcgatagccgcagtgattttatccatgatctttttaccgaagcggaacttaaacaccttaccttcgttttctgggtgcattggatctttaaccaccagaatgttcgcccagaacgattgtttacgtccgatcatacccagtgttttttcggcttcgctgcctttcactttcgctttttcgaacagatcgttttcagagatatactgacacacagggcaagcatcgtaatcgccgtgggtagacgggcagttttcgatgaaccactggttattctttttgaatgaatggttgacgatacgcacgaacgccagttcatcatcagatcggttaggcaggaagcggatcaccgcagaaccgtttttctgtgcatcgacaccgagtttccactctttttcatctttctggaagccggatgaacctttcagagcggcgacttgttcttgcagtttggttggatcttgacgtttaaagaatgacatatgttatttctcgtttaagttaattaaggtttgtttcattaagtttcggtattttacgatttcttcgttactgatttcaactaattttctgtatgcgtttagttttttgctaaattcattccagacgaaatccgttgcgatttcatcgtgtttatttatgatgtctaaaaacgagtcgaggatcaagaatgattcataagaaatcaccccagaaagtacgagcttgctgatatacgaggttgatgatttgacgctatactgaaacaccgttgagaggggaatacctttcatgcgggaaaattcatacaggttttttacatcgtccacgaaaatattatcaattcgcctcaacttgcctatgtattgacgataaaacacgatcgtatcttcgtctacatccccgacccagaagtcggggttagctaccatgttggagagaagtataagatatatttctttgaatgtaaacctttcggctaactttttgaaaaaatacttatctcttctcttttcgaacgctttttcagtgatctttatttcccatttgtacttgatcgcgtcatacttcccagcaaagtgatttttcatcaccagatacagtttgtataccgcgatcggtttcaaacgggaattagcgtctgaactgtcaaacggggttttaaatttcacatgaaatcatccagtgtttgcgtcgtcgcgtggtctttagccacagaaggacgcagcagattgtttttaatggcttcgtcgctaatcttgtcgatgatcgctttcggtactgttttggacagcatagcataatcaatgctgttttcgtccatccattgtaacgtagcttccatgtaggttgccccctcagaggcaaccagattttcgatatacaagccgacttcggttttgtttccgatttcgctcatattacgccttatcgatcacatcgtacagttcgataagttcgttgttctgttcttcgaacgcggtacgtgcctgttcgtgatacagtttgaacagcttgccgaaggttttaccgtcgataccataatccgttttcgctttggatttgatgtctttgaaagaaccctggaagtgttcgatctgggttttcacgttcgacgcttctttgatcagttctttaaccgctttagcgatgtctgggttttcttgcagtaattctacactcattttgttacctcaaaagtcacttagtttttcatacatacgggtaagtttgcattccatgaagtatttctccatttttgctttgttcccgatttttggagcattgtacgcttcttcgattgccgttgcaacatctttcggaataaaatcaaagtcgcgaagttcttcgttttctctgtaacggatcgcccactcttcgggcatacccacggtcggatcgtcagcttccagccaggcttcgagttcagcagccctgatttgtggggcgcgttctccttcaaccttcgtaacaatatagtcatttcgcattttaatgcaagcgatactatcttttttatcgcccttgatgatcttcatgcgcaaatcgttacgaggtgaaccatatttcggtgtaacccatttcttttgggttggcgaccactgacgcacaccctgatatttttgaagggctgcaaagtcaccatcagcagaaacgatcaggacacgtttaccttcggataccgctttacgcgtcaccacaccgatcacgtcatcggcttctgcgaagtcaacacggatacctttgtacggtaaattagcacggatttcatcgtatgtcgggtgaaggaaaccattcaggcgatcccagtcccaatccgatgcttcttgttccatttttcgtttctttttgtagtaccaggctttacttctgcgccaatacttgttatcatcaaaggctagaacaatttcagggtactcgcctttgaatttaaccacattgtgacgaatggtgtcaagcactatgtgacgaacaatttgttggttgatgtcattctggtctttcggcttgaagttgttcatcaacgttgctaccgaaaggtttgaaatatctatacacatcacatcaacaggatcatcgtcattgctcattaagctgttcaggttgaacatacttgcaaatgaagacatttcaatacctcgttgttgttgaatgaaactgattatagtgatcactttttcaaagtcaatagatcatttcaaaaatctgagcgaagcgaaggacacgaacgtagtgagtgtctatgtactgaatgtacgttttaatatttttatattttatatatagagaaaacagtacatttccgtatactttttaaccagtttaactatccgtttcgcttcgctcacggaagcgcttcgcgctgattttattaaataatatagattggaagtaggtttgaaacacctgattcaatcggctataatgaatgtattcaatttggagaatataatgactacaaagatttatgcagataatgataagctgtatccagttatgtgtaagtggaaacagcaaatccgtgaaactggtgatcgtaagatgccggatgaactcggtattgcgattatgaacattgctcacggtttggcacgtcgatacaacttcaaccgttattccgaagactggaaaatggatatgatcgatgatggaatttcggcaacgatttccggccttcataactttgacgaaaccaaatatacaaacgtctacggttacatcaacaaggcttgctggcaagcgtttgtaactcgtattctctacgagaagaaagagaacgcgaagaaatacaaatacttcctggaacatgtctatgacagcgatgatactgatatgaccacgatagccgatgaaactttcattcaggatatccatgacaaacttaatcagtatgaagagtccgcgaaaaaacccaaagataaaatcgaggttgtggacgaatcgccaacattggaaatgtttctatgaaaattaaaattgacctgaacaaaattttagcagatgctaacgacgaaattgatctgcttccttaccttgtgaaattagagttgcagagcttagggattccgattatcatcgaccctacagatgtacgagatccagacttccagataacagaaggtcgtctggactatgtaataaacgccgaaacaatgatcatggagatcacttactatgaacgtgcagcatgaagtaatcgacgaagtacaccaaaaatcagcgctggatcttcgtgaagaagaactggactccatcaagggtacacgcattgaacaggaagccctacgcaaagcgcaaaagttcatgcggaagaacaaagcggaatggaagcgactgcataaacacgcagagaacgcactcttcgaaggtaacaaagagcagtacgtatacgcgatcaaaaagatgcgtgatatgctcaagcaaccatacaacgatgaactgattgaaacgatgtggatcacttcgaaccagcagttgaaagacctgttcatcatggcttctgaaaaatacggcaaataaaccccttcgggggttttgaggtttatatgaactatgttttaattggggatacccatgccggacttcgccaggataacccctggaacgaagaaaacctgtatgcggtattcaaacagatcgtagagtattgcaaagaacacgggatcacgcgcggcttccatgctggcgacttcttcgacgttcgaaaagcaaccacacaaacgacaatgaattttgttcgtgaaaagctggttcctcttctgattgaggcggggatcactctggatgttcttgtcggcaaccacgattgccaatttaaggacaaaatacgccccaacgcgccacgcgagatactaagtcaatacgaatgctttaatgtcatcgacgaaccgaccacggttgatttaggtggcggaaattcgattgacctgatcccgtggatttgtcaggaaaacagccagcgtatttttgactacatcaaacaatcgaaagctaacttttgtttgggacacttcgaactgtctggttactatttctacaagaacagcaaagccgatcatgggctggaacctgatttcttgaagaagtacgatcgtgtttactctggacactatcaccacgctaacgagggtgataacgtgttttatatcggtacgcctctgactatgagcgcaaacgacgaagacgaaacacgcggattctatgtgttcacgggcaagcctgaattgactttcatcgctaaccctgtgtgtcaccatcgccggatcatgtatccagcacagaaagatgttgatctcgaacagttccgcaactgtgcggtgcgtcttattgttagcgaaattgatcaggggcttgcaaagttccaaaccaaaattgaagaaattgcctatgaaatcaacatcatagacaaagttcaaacagattcggatgtcgataccgactttgaaatcaaaaccgttcgtggccttatcactgagtatatcgccaacatgcagatcaccgacgatgaaaaagaggaagtgaataagctgatcagcgaactatacgcggaggtgtcaagtgcatagccgttatgatgaatatttcggggcgaatccccgatattctcacctgttgcgtatgttgggaatgaaacacatcatttccacatccgacgaagcaggggaaaccagcgcagtttgtttgaccatcatgaagggtgcatggcattcatcacgaacatggtcaatattcatgcttgatacactggacgacgatactctatcatatagtattgattcatcagttgttcaaatgatcactgaattatgtgaacggattttaaatgaaactaaacttcaaaaaaattaagtatcaaaatattctgtcggtcgggaacaccccgatcgaactggaatttgatacagcaaagaaaaccctgatcacggggaaaaacggtggcggtaaatcgacactgatcgaggctttaacctatgccctgttcggtaagtcattccgcgatctaaaagtcgggcagttggtgaacagcgtcaacaaaaagaaatgcctggttgaactggaaattgaatacgggaaagactcgtacaaagttgtgcgcggacaaaagccgaaggtgttcgagatctggaagaacggcgagaagttgccggaagactccgcagcaggtgattatcaggcacagcttgaatctatgctgaacatcaaccttgtgggcttcaaacaggttatcgttcttggtacagcgggctacactccattcatggaactgaaaacccccgaacgccggaaactggttgaagatttgctgtctctgtccgtcatcagtgaaatggacaagttaaacaagtcatacattcgcggtgttaatcagcagttggatacactctcaatgcagggtaatcacatccagcagcagatcgcaacacaccagcgcttcattgacgaacagcgagcgaaagcaaaccagaacaacgcccgatacaaagagatctacgatagccacgtagaaaccgcaaagaacatcaaagcacagcttatgcagttgcaagcggagattgcggaatcggtgatcactggagaagaccggacggaagatatcaacaaactccgtgacggttattcgcggctctcaatgactgtagaacagtttaaaaagctggaggtgatgtatcagaaaggcggtgagtgtccggcctgtaagcaagcgattaaacccactcctgagcgtatggcggagatcgcagagaacatcaaagcgggtacacaacgtttaaccctgatcaaaaccaaacaggacgagttacaagggatcatgaatgacttgctgcaacagcaacgcgcactcaatgccctgaaaaccaaatatgaagccctgaaaggtactctgcaaaacgaagttgccaacgctaaacgcgcacaggcgatcatggaacaggcaagcgcggaagtagtcattgatgaagaacccgtgaagcagttgcaacagcaggaagcagaactgaacgaaaaacgacaaggctacgtcaaggaaaaatatattcgtggtattgttacggatatgttgaaagattccggcgttaaagcgagcatcgttaagcgttatattccgtacttcaacaaacagatagcatattatctggatctgttgggtgctgattatcagttcactttagatgacgagttcaacgaatcgatcaaatcactggggcgcgatgatttcagttatgcgtcattcagtcaaggcgaacgcgctcgcatcaacttgtctattctgttcacatggcgtgacgtgacaagtaaagtatcaggcgtggatctgtctctgctggtacttgatgaagtgtttgatggaccacttgataaagagggttcattcgcgattaaatccctgctggattctgtagatggtaacgttattgtaatcagtcaccaggatcttgatccgcaggacttcgaccgccacatcatcatgtctaaggttggacggttcacaaaaccatcaatcaaagatatggcgatctcatgttagaacgtgaatttgatttaaagacctctcccgaagtggagaggttttatctccataatgaactattggaagaaaaacatgtagttacaatggcagatgttgaggaagcattcaaagataaccccattgaattgacccgcatcaagaataataaatcttcggtgtggttcctcgaaaaaatctattgacagtaaaacataaataccttaaagtcgcccgtgtactgagttgcacgggtttttattttgaggaacggaaaatgattaacgaacaaatgtcacacagcgaagcattgaagattttgggcgctactggcgacgaatctaaagctgaactgtcaaagctctttaaacgtgcttctctgcgcaatcaccccgaccgtggtggtagcactgaactcatgcagaaaatcaaccaggcgtatgacgttgtaaccaaaacaaacagcgctggtaaaactttcagtgatgttcgcgcagaacacgcagcaaacaagaaagcgtgggaagaaaaatttgcagcgtatttcgtgctggcgaaaaactatttcagcactaaattcaacgcgcaagaatttgcggaatatttcacgaaattcaccggacaaccaacaacctatacccagacaatcagcgaagttcgcggtcatactgttcacgcaacctatcgtttcacttctggtgatgcgttctttgacttctctttctcttgtcaaccgcctaacggtcaaggtttagcagcgccggacgcgtccgcactgggtagcgtatcagttaatactctggttctggttggtacgaagaaacacaaaatggcaagccgtgattaccaatggggcaagaacccagacaaaatcacgccggaaagcctgttccctactaagaaactggaatccatctttagcccgactaagaaggatctcaagttcaaacgcgcggactacatgacatcctttgcccgtatcctgggtgcgaaggttagcggtaacgatgttattgttgatgttggacactataaagttcacttctaccgtcacgtattcatgcgtaaaggcgcgtatgtgttccagtatgttgttgacccaactgtgaacaaattcaaacctgctgaacgtctgaaaggtactatgctggaagatgaagacggtgcatgtctggatatgatcatcgacactttcaaagaaatgcagaaagtaaaaccagacgcaagcggcatcgcagcggtaatcgaccggatgaacgcagagtttgcagcggggcatcgttcagcatcttttgttaaacgtaccgcacagcaagcagcagcgccagcgccggaagagaaaccaaaacgcaccgttaatcgcatcaataaagatgactatttcaacgcactgaaacaagcgggggcaacattccgcagtaactacggtgagtttgataacggcgcgggtttgactttccacttcaaacgcgagatcagcaaccgtaaaggtttctggagtttcagcagctttgatttcatgcactccggtcagaaacatgttgaatggttgaaagatatcgacattgacgaggatagcaaaggcgcaagtatcggtttgctggttgataccctgaaacaacttcgtggtgttgctgactggtacacagcccgtaagatcctggaaggtatgcgtgataacttcaaggctggtaaattctcagcacctcatgtgaagaaagaagccgaacagaaacgcactgaaacgcaagctaaggacgagttaggcgcacagcctacgaaaccacaggcagcgaagaaagaagccccagcggttgataaggcgcatcaggcacagatggatcgtgagaagtcacagatgaatgcaaccattcgttctatgctctctgccctggttaaagccggacgcaaagacacgccggaagaaattaaaaaagcagttgatgaagcaatcgctctttggcgcttgaaacactaactgattatgctataatgggaactgttgaaaagcagttccctttttttatgaggtgagtatgattattcaggtatcggttcagggcaacaccctgacagtaacaaattccattatgaccgctatggctgcatgtcgtgatcatgtgatgtcaaaccctccggtaacggaaattctggaaattgatgtatgggaagacggtgtgatcgaagaatcatttggtttcactccgttagaggaagatttacgtaaaatggaacaatggctatggcaaactgtaccccaatgaaactaccaaaacacacaaccctgttaacccgcgaaaaacttcattctgttgaatggagtccgttagatgtgatggtgttcgatctggaatccaaaatcatcaacgctcatgttaacggtttgagtatcttttctgttgaatttgaaaagattcgcgggtacaatgaagcctgtaaagacaaattgcgcgtcatggttgaagctatgggctacatcgtgactattgaagacaacaaaatgtggatcgcgctatgagcaaagtaaaagcagttttcgccgttggtcatgatatgtacgaagtggactatgcgtttggttatgaacagggtttaccgtggggccactgcaaagaggatttgcagaacttcaaagaagaaaccgcaaatagcgtcctgatcatgggtgcgaacacttttacttctctgcctggtaaattgccagggcgagttcattgcgttctgtctgcatccggtcaacgtctggtaacaaagaacgggaataccgctgattatgtcatccacggtggcgggttgtctgctgcaatcgacgtaatgaaagaaacgcatccagatcgtgatgtgtgtctcattggtggtaagtggttgcttctgcaagcaatcaataatacaatggttgatgaagtggttgtgacgcacatttacggacatcatgtatataatgcaccagcttttaaacgtgatgtttcattcacggttcctgaattctgtgaagcggttctgaaatatgaactgactgatttcaaaattcagcagatcgaatcaaacgaacgcgtcagaaaaattatcgtcgatcgacatacgaaaaaggcataaaatgaaacaatatcttgatatcgtcaacaccgttctaacacacggtactgaatcaaccgatcgtactggtgttggtacactgcgcatcttcgggatgcaagcacgttggaacctcgcagaaggtttcccagctactaccagcaaacagctattcttcaaaccgtgtaagcatgaattacaatggttcctcgaaggttctaccaacgtggaaacactgcgtaaaatgacgtggggtgaagatagcgataagcggacgatctgggacgataactacgaaaatcaggctaaagcgctgggttatacgcatggttatctgggaccgatctacgggcatcaatggcgctcatttggtgcggaaggttcttattatggtgttgaccagattaagaaagtcatcgaacaactgaaaaccacaccagacgatcgcgggatcatcgtttctgcctggaacccgatggatctggatgatatggctttgcgtccgtgtcactgtttcttccagttcgtcgtaatcaacggtaaactgtctctacagtggtatcagcgttcagttgatgtcttcttagggttgccgttcaatatcgcctcctacgctctcctgacgcatattatcgcggatatttgcgggtatgaagtgggtgatctggtttggactggcggtgatgtccatatctacaaaaacgcagtagaacaagcgaaagagttgttgaagccggaacgcgcaccgcttccacttccgaccctttatatgccgaaggtaaatagcttacttgatttggatcaagaattctttgactccatccatttgaaagactataatcaccacggctcgctaaaagcagctatggcagtataaacaaagggggcgaaagcccctttcttaacaaggtaagataatgagtgatattaaaacagtagtgaagtcttctggcgtaagtcaaacgttcgaaaaagaaaaactgttcaaagtccttaattgggcgagtattggaagaaatattgatgttaacgcattccttgaaagtgtcgttgacctgcttcgtgatggtatgactaccaaacagatccaggctgtagcgatcaagtatgcagcggatcgaatctccgcaaaagaacctgactggcagtatgtagcggctaacctcgaaatgttcgcccttcgtaaaaccgtttacgggcagtttgacccgattccgttctacgaacacatcactaagctggttgaggctggaaaatacgataaagaaatcctgacaaaatggactccagcggagattgattatctggaatcgaaaatcaatcacgataaagattttgaattctcgtatgctggcgttcagcagttgatcgggaaatatctgttacaggatcgcacgtccggcgacatctacgaaacaccacagtacgcattcatgctgatcgcgatgtgtctgcatcaggacgaaaaacacgctgataaaatcagtcacgtaattgacttctataacgcaatttcggatcgtaaactgtcattacctacgcctattatggcgggtgtgcgtactcctacgcgtcagttctccagttgtgttgtaatcgaatccggtgattctctgggttctctgaacgctgttacgtccgcgatcgtgaagtatatctctcaacgtgcgggtatcggtgtcaacgccggacacattcgcgctatgggttcaaaaatccgtggtggtgaagcagtccatacaggcgttatcccgttctggaaacacattcagacggcggttaaatcctgttcacagggtggtgttcgtggtggtgcagcaaccctgtattatccgatctggcatcttgaagttgaaaacctgctggttctgaaaaataaccgtggcgttgaagaaaaccgtattcgtcaccttgactatggcgtacagcttaacgatttgatgtataagcgtttaatcaataacgattacatcaccctgttcagccctgacgttgcgaatgatcgcctctatgacgcattctatcaagcggatcagagtgagttcgaagaactgtataccagtctggaaaaagacccaacggtacgcaagaaacgtattaaagcggtagatctgttccagttgcttgttcaggaacgcgcacagaccggacgcaaatacattttcaacagtcatcacgtaaaccagcagggtagtttctctgttccggttcgtatgtcgaacctgtgctgtgaaatcgcgatcccaacttcaccgctggacgacgatgataaactggctggcgaaattggactgtgtacgcttatggcgatcgttctcgataatgccgatataagcgaattcccagcccttacacgcatcgcagtacgcgcactggataacttgctggattaccagaactaccctgttgcggcggctctgaaagccaaacagcgtcgttctctgggtgtgggtatcaccaactatgcatcatggctggcaagcaactattgcgactactccgaagcatacgccggaaacgttcatgagttgatggaagcgtttcaatttaacctgctggttgcctctatggaactcgcacaggaacgcggtgcatgtggactgttccacgaaacgaaatatgcacaagggctgttgcctattgactggtactgcaaaagcgttgatgaactggcatcacctgtgtataactgcgattgggaatggttgcgcggtgaaattaaaaaacacggcttgcgtaactcaacactttctgctttaatgccttgtgaaagtagctcgcaggtgagtaactcaaccaacgggattgaacctccgcgcggccctgtgagtgtgaaatcttcgaaagaaggttcattcaatcaggtagtaccaaaccagaataatcagattgacttctatgattatctctggacaatggcaaaacgtggaaacaaaggttatctgtcgcacgtagcggttatgcagaagtttgttgatcaggctatctctgcaaacaccaactatgatccggctaacttcccagatggtaaagtgaaatctgaaatcatccttgaagatctgctgtatgcaaactatttcggcatcaaaacgctgtactaccacaacacccgcgacggtgcaggtgaggaagaagcggaagattgcgaaggttgcaaaatttgattcaatgccccttcgggggctttttataaggtaaatccatgttaactgtaatgaacacaaacccagatcacaaacacttagaacagcctatgttctttggtgaggatacgggcgtagcacgatacgaagaacagaaacaccgtgtattcgaaaccctgactgaaaaacaactgtcattcttctggcgaccggaagaagtggatctgtctatcgaccgtatgcagtacgcgaaaatgccggaacacgaaaaaatcattttcgattcaaacctgcaatatcaaaccctgctggataccattcaggggcgcggcccgaacctggcgttcctccctatcgcttccgatgtctctatggaaacgtggatcgaaacatgggcgttcagtgaaacaatccatagccgcagctatacacatattcagcgcaacctacacatcgatccgtcgaaagagttcgataaaattctgcgcaacgaagcgatcatgaaacgttcggcttccatgacaaaatactacgatgacctgatcgcagaatgtcacgaactgaaaaacattgtgctcaaaatcgaaatgttaacgtcccacggatacccagacgaatcgatcgcagagtacgaaaagaaacgcaaagagcaaatgcgtaaatgcaaaatcgctctgtatctgtgtatgcacgctgtcaacgctctggaagcgatccgcttctatgtgtcgtttaccttcacgttcaactttgcggaacaaggtaagatggaaggtaacgcgaagatcatgcgtctgattgcccgtgatgaagcacttcatcagaaaggcactcaaagcaagatccgactctggcagatgggtaaagatgacccagaaatggcggaaatcgcttaccagtatgaagaagaagcgacaaagattttcctggaagtgtacgaacaggaaaaagaatgggctgaacacctgttctctatcggtgatgtagacggcgtatccctgaaaagtacgatcgcttatatcgaacacctgacagatcagcgtatgcgcgcggttggcttgcagtctccatttaaaccaacgccgaacccgtatccgtggatgaacaaatggttgaagtctgacaacgtacaggtagccccacaagaagtagaagtgagttcttacctggttggcaacctcaacaccgagatcagcgacgaagcctatgcaaaatggcgacaaaaatacgcttgattgtcgcgtcgtaaacaagtataaaggtagctgggatgtcgatattcagagaggtacgaaattcggcaatcccttctacaagggaacacgggctgaaaacataatgaagttcatcccgtatttccaaaacttgattcgaactggcgtgatcacaatcgacgaactgaaagcattggacgggaagcggttaggatgtacatgcaaacctctaccgtgccacggtgattatattgctcactgcgtcaatgtgttgaccggaaaggtgaataagttggatatataatggacgatgtaacatttggtgtaatatttcctttgcgtctgggttcagacaaaaggatagaccggagttttgttaaatgtggagaattccggcattgtgtgtattttattgaaatcgacggtcggatagtgtatgttggaaaatgtcgtgatttgtggaagcggttagacacataccgcaattcgaaatactggagggaagcaaaccccagtaatattttgaaaaccgcacgtctggaaatggcaatcaaaaaacgtaagcgtgtaaatcttatcgtgacaacacacgatgaagacacatatcatgattttgaaataaacatgatccgaaaaatcaatcctgaatggaacaaacagcactatgacaaagctaaccaaaaatcagaaaaccctctttgaccagttgatgaaactgtgtaacgaaagcgaatgcttctacttcattgatcaaaaaactgtgatgcaaaccaacgtgcgcatctttaactatcgcatggcgagctattccgactggttaaaacccggtgcgctggaatgtcgcggtatcatgtttgcgatggatggggatacccccgtaaaactcgtcagtcgccctatggagaagtttttcaactatgccgaggtaaaggcatgggaagcactgaaatcctctcctgtgacgattggtgaaaccgtagtggatgtgatgattaaggaagatggttccctgatctccaccttctgtgattccggctatctgggcgttaagtctaaagcatccgttcaatctgaacaggctatggacgctatgagcgtgatccagactaaccgcgcattgttcgatcgcctgaccgaactggttaacgatggtttcacagtcaacatggaatacgtcgcaccgacaaaccgtattgtaattggctatcaggaaccagcagtggtgatcctgaacatccgtaataacgacacgggcgaatatgtcgattatcaggatatcttcgcagatggtgtattacgtccgttcctggttgagcgcgagaaaatcgaaatcaccgatctggatgcgttcattaccgaagcctacacgaaagaaggtttcgagggttacgtgatcaaaactgataaaggttttgtgaaagcgaaaaccaactggtatgtaaaccttcaccgcacgaaggatagcatcaacaataacaaagatctgttcttaaatattgttgaaaataccgtcgatgacctgaaacaaatgttcctcgatgatatgtacgcactcaagaaaattgacgcattcgaaacgttattccttgatagtctcaatcgtctgactgcaaaagcattccaggcaatcgaagacacgaaaggcaaatcacgcaaagactacgcgatcgccctgagcgctgacttaacccctgacggtcgtattatcttcgggcctatgatgcgttatttcgatgataccgataagcaaaagctggttgataacatcgttgcattaatggcgaagaactacgaacagtttataccggaagaatataaatgacattaccagcctttccaaagttaacttctttggtgtggcctgtcattgtagccctgtctttggcagggcttttgtacatgacaatcacgctgaaaagtgaaaatgaccaattggctaaagatatcaaagagttacaggctgatatcaaaaaagtcaaagagacaaacaacaccaatacggtgatctatgtcgaacaaaaaggtaaggatcagcagttggtcaaggatgccggacgtaaagacctgctgttcaaaaaaccaggactgatcgaaatcaagatcaacaagtccttcgaagagtatatggcggagtacgacaaatgaaaattgcaacgttagcccttgttctgggcgttctgttggttgggtgtgcggagaagcccccagaaaagattttgcctacactccccgcgaaggtgaatccggtgaatgtgaaatggaaagtggttgcagaagtccgagagattgacggtaaaaaataccttgtcatgccttatgacggaaacccatacgttgccctttcatatcccgattcgttaatcttccgtagctggatgaatgacgttaagcgtcagaaagaccagacggataacattctgtgtaccgtgggataccctgagaaatgcaagtcaaaataatcaagtcatttttccgtgacataaccgaaggaaaggtttatgatgcgaagaaggacaaagaaggtctctggatcgaaaatgactggaaccgtgatatgtggctcaatctaacgaatgagcataacaaagaactgattgaatatgagattgtgaaatgaatctgtttattactgtaggcgtaccaggtagcgggaaaactacatgggcgaaagaaaaagcgcgtcaactggggaacactctgactgtttcccgtgacgatatccgcaaaaccctttactgtgctggcggtgatctcactggctatcgcttcaccgaagagaaagaactgtttgtttgccgtgtgcaagaagatacagttcgtaatgccctggcgagtgggaagaacgttatcgttcacaatacccatttacaccaaaaagatcatgatgtgtggcgagagatcgcgaaagagttcaatgctgatttccatatcgaatggattgatgccgatatcgtagaactcctgaaacgcaaccataaacgcggtgtgaatgctctacctgtttcccgtgtctgggcgatgttcgaacagtaccgtaaactccgtggctgggttccggctatgagctatgcagatccgagcaaaccgaaatgcgtcatcttcgacgttgacgggacattaaccaaagttggacaacgtagcccgtatgacttcacgaaggttatcaacgatccgcctaaccctcctgttcaagaactgttcaggatgtataaggccgctggttatgcctgtgttgttgtgtctgggcgtgagggtactgtacagtgcgcacatgataccgctgcaagcctgatcggatacgatgttgacctgagcgatggtatctacatgcgcgaagaaggtgatcatcgtcacgatattcacgtaaaagagcaaatacttgttgaaaagattctcgataagtattatcctgttcttgcagtggacgacagggatacaccagtcgggatgtggcgaatgaacggtatcccgtgtttccaggttgattacggcgacttctaaaaaacagttgacagtgagtgcgggtgtgataagatacccgcacaaacaaaggagaatattatggttattcgtgaaaatgaaaatgtgatggttgaactgggtgatcgtgttaaagttgagaatcctgttgaacttcaactgaaactcaaccagttaggccagcgcattgctgataaaattcctgctggttatacagtgaagattgtccgcgatggtcagttctccttccttctgggtattctgagtcaacgtaacatcgttgaacaacagttcgggattcagtggaatccggtaactaaattcgtaacatgggcggcagtattatgagtgacaaaatcagaaagatccatcaggcatggttctgtactgaaccaacgatgcttcgttatggttgtgtgtttgggttggttgataacgatcctcaacaggacattgcaacaagtccggttgttgaatacgcgattccggcgaacaaatcgtttgttgaagtggtgacacgttcaggtactacgtatcacatcgtcaaccctgataacgatttcatcaaagacattctgaaatatatggatgaccgttaatgaaattcaaagtaatgaatatgttgagagcaatcgatcggagtcaacgttctcaatgtatttcgaatcgtgtaggtgctattatcgcgataggtggtcgtgccgtcgcgtggggcgaaaataatacggttgaccttgattgtcgttgcaactcatgcaacaatcatatggtgaatgatgacggtaaactgaaagcggttgatcgtcctgaacattcagcatggtcaaacgataacgaaattcatgcagaaatgaaagcgctattgagtgcgcacacaagaggtgttatactcaaagacgcagcactttacacaactgcatcgccttgccctaactgcgcgaaacatatcgaatggtatgttgctagcggggcgattacatcggtgtattatctcgataaatacgatcgtggtaatgatgaatggatttcacgcttgcagaaatatggctgtgtcgtggaacaaattaaacgggaagagttagaatcgtttatcgacttttccaaagtagtgtttaacaacaatgagtaaagaaatgtctgaactgaaagtaaaagcatccggcgaatatgtgatcatcgaagctactgcgcgtccgcagggttccgaaatcaaatctgaatctggtatcgtggttggtgtacgccagcacggggaacaacctttttatggtaaagttgtttctgtaggcgtagacgttccaccagaagcggcagaacgaatcctgggtaaatatatcccactgccaagcgctcacatggcgaatgttcctgaccctgatctggttgcgggttacatttccgaaaaagaagcaaaagagaaggaaacaaaatacgtttccgcacattacaaagcaatccaggcaatctacgagatctaaaaatggctaaatctattcaagcaattatcgctgataccgtcagcaaatccaaaaagctgttcgacaaaggcgaaattctggaagccccagcgcgtattgacgtaatgacagcaatgatcattgatgcgcatcagggtaaacttaaatcccgtgccgatgaagtcatggcgtacatcgtccagttcgaagacgtatgtaagtacgcgaaagatgttgatccgctggttcgcgaaatctatcgcaaacagttctaaaaaaattcgcaggtgtagttcaattggtagaatatctggtttccatccagattgttgagggttcgagtcccttcacctgctccaattcgggtgcgtagcgcaatgccgttaaatggttcggaatatgcaaccatatcccacgggataggctctgttggtatccggtaataggttccccggaatgcggggtgaagtaaagaaacttccagcccactaaacaatgtgagatctatatgagaattcgtgaaaagacggtgtatgactctaagttaggcaaaacaatccatacgttcaaagagattacgccagcgcaattcaaagagcggtacggcatgacattcaacgaatggaaagcggggttatgtaaaaatgactaccgatataaattaaaattccgtgaatgttatgttgatgacgatccttatgcagcagatgtatgtggtgaaacagtaccaattatcgagaattcgcccgacgcactaatacaatcttgtatagacgcagcatatgaaatttaaaagagaaaaatatgaaaggtcttcaaaagctgtttgaattaaccccaaaaattcgcgaaatcgtcgctgcatcaactgaaaaagaaatcaacggtaaattgatgaaactgtttaccgaagaaatcccagatttcgataacgaataccgtaaagcgttcgatgcgtattctgttgatggtttctttgcatcaccgcaggtgaatagcaaacacgaatatcatcgacgattctttgactggtcgatcgtcaatatcgttcgtcgaactgatatcgaacctacgaaccatcagttgatctctatggattcttctgtattctttatccagtaccttatcactggtggatttaaagcagaaggtattccgttctgcaacgaagctctggaagaagaattcgcagaagcgtataagtatatcaaagcagttcgttaatcaacaggctatcttcggatagccttttttctggagaagcacatgcgctttttaaaatacgcaagctggcttgtactggttccccttgatattctttctggtgttctggctattctgctggctccttttgtggttccgttctacagtgaagaaaccggacacttacctaaagggttccgttggatggaaacattcgataacccgatcgatggtgatggtggacatatccggcgttgggctaacatccggtatcacttaggcgatctgggtgtgtatgcgcaacgtgtaggctggttgtggcgtaacaaggcgtacaacttcgcttatcacgtcttagggcgtgaagcacaatcagacttcgcctggaagggcaacccgaaaacagaaggtggttctgatccttcgcgtcacggttatctgttgatgtggaatgattcggcatgggggctttatgtcttcaaaccgtggcttaaagtcggaaaggttcagttctgcttacgcgtgtattgcgggtggaaactgaaacaggaagtaactgaccctaacgggctggatcgtgcaatgctggcgttccatatcaacccgttgcgttattatgtcgtagaaaggtaatacaatgaaagcatatcagattttagaaggtttacacactggcacaatctacctggaagaaggtaatgatgttcgtgtggtggtatccaaaaccctcgaaatggattcagtgatcggtaaagctcgcgttgctccattcgcaaaacgtgaagtcgatattgaatttcaacccactgttaaagtggaaggtggacaacacttaaacgtaaacgtgttgcgccgcgaaactctggaagatgctgtgaagcatccagaaaaatacccacagttaacgatccgtgtgtccggctatgcagttcgtttcaattcactgactcctgaacaacagcgcgacgttatcgcccgaacctttacagagagtatataatggcgattgaagacgtacagggctataagccccactcgaaagaaaagatcgacaaagtaaaccgcatcaaggccgcagaagttgccctgggcgaaatcttcaaagaactggatgaagagtattcaagtgattacgcggtatctgataccgattcattcactaccgaagaactcgatgcgatgcttgaacgtgtccatcaaatccaactggcgaaagaccgactgaaagaagcctctatgtgggcgtgtcgcgcggttttccagccagaagaaaagtattaaaaatcaagccgttgccgaaaggtagcggcttttttcgtttttatgcaaaataatgcttgcactgaatcgtgagtgtggtaaagtacacacatcgaaacgaaacagagaaaggaacgagaaaatgattaaattaaacccaatcgacgcagcaaaacatttcgtagtagttgataatggtgttgtggttgcagaagttaaggaaatcgctttctctgacccagacgcggaaatgaaaagaatgggctactcttaccggatcgagcacaaaaacggtgaagtagaatacgccgacgatatctctgacgttcaggcgaaattctaaaaagttgttgacctaatctgggggttgtgagaatatagccccatcgaaacgaaactgaggatgacattatgaaaacttacaacatgaaagaactggtttgcttcaacactcgtcgtgaagcccgtgcgtatgttctggctgctggtaaaaatacctctgctgtaatcgacctgggtactgataaagctgttggcgcacgttgggctgctgttgtggttatcgctgctcctgtgactcctgttaaaactctggttctgggtgcgcgtaaagccgaaactctgaaaaccagcacttgcaataacagaggtgttcataatgtcaccgtcatcaaaaaacgtagctttggtttgagggcttaacaatgagttccattaacacagaaaaagattttgtgatgtttgtcggggtacagactgtaaagaaagatatcttcggtaaactgtacctgtcgaacgacgatcgcaacccagcatcattcgaaaccgaagatgatgcatatatcgcgaagaacaccagcgataacgaagacattcgccagtatgcgcggatctataaccgtgaagtaacaacccgtctggagagagcgtgatgcgtgaaggtatcgaagtaagaacgtttcagttcgaaatgcgtcgtatcccagaagcatcaatgaatctcattcgagaacacaacgtgaaaatcgtagaaattgatgcatacgcgggtactgatctttataatgatgcgaagattgacagcattgatttagaccttgagggtgatattggggatctgaataagctggctattgcattgaatgcagaaaccaacaaatacgggtatacaatcaaatgaaatatattctcgaatatcatgagcatcaaattaccgaagcaatgatcgataagatgcgggtatataaccaaaacattaccagcatcaaaccgctatcagtgtgccgtgaatttgggggatactccttcgcgatgtacacaaattccgaagacgacgcaaccgcgtatctgaaaagtatcggtgcaatattcgacaaattcgaaaaagtatggaaggtaggtttctaatgaaaaagtattttattgaagcggcagatcgtatcgttcttgctctgttgaactggaaccgtcgccaggatgtctctatcatggcatcaaccaacgggacaacatatgaccgttatgatccggtgcgtggactccataagccttacgaggttaaagcgtgaagtattacggattcaaaacgagtcattacggtaaagcataccgcactgacaacattgatcgcaaacgtccgtactatgattctctggtacgtgctggacgcaaacgcgctcgccaggaagggaagaaggaagccgaaaatgaaacagaatagtgaactggctttgattgcttttggttttgctctgggttgtatggtttccgcgttactcgttaacttcgcggggtgattatggacatcggatcaggtagtcagtatccatcatgcgcgttgagcaacttcgccccgcatccgttcacgtttgacggggtagaatgtgcatcaatggagggctttttacaaagtctgaaattcagcaatccagatatgcaagcgcatgtgtgtacgctggttggtaaagccgccaagttcaaaggcaagaaaaagaaatggtatcgcgatcagaccctatactggaagggtatgccgattcaccgtgaatcagaagcgtatcaaatcctgattgaaaacgcgtacaatgctcttttcctgaatgatgggttccgccgtgcgctggctgcaaccggaaaaagtaccttgactcattcaatgggaaagaataagatgaatgaaactgtgctcactgaacgtgagtttgtccgaaatttaacccgattgagagatctgttatgataggttataaagattatgatgaaagagtagaatgcgcgttcctgttcaaaggcgcgatcaatccgctggcattactccacgcacagggagctttgagttctaccctgattatgggtgttatctacaaagcgggtgtgtattacgtcaccatcggcgcgaacaacattaacgtgatcaacagctacgttgaaaaatgtaagctgaaagatattgtgttcgataaagtcgaaatggatgttccaggcttcgatgctgtttatatgtacaagggttgataatgagttacgtaatttatttcgattgttcggatcttgatcctttcgttctgcaacaggcaaagaaatatcatcaagatatcactggtatcagtgttacgaacgatgatatgctgtgtatcgaatttgattattatcgtacatttgagcgtgacaaattccttgcggatattgaagcgtttaagagtacccttttctttgatcgttatgaggttaaatcttgaaaccagttattcttaccgacattgacgggatcgccgtgaagtggcaaagcggcctcccgttctttttgtctaaacacaacatgccgaccgatattgccctggatatggttacagatgaaaagttccgtgatatgaccgaaatcttcgggtgcgatcatcaactggcgaaaattctcatggaagaatacaataacagttcgtttattcgctatctaagcgcgtatgacgatgcgttgattgtgatcaaccgtctgaaagcccaatatgatttcgtggctgtcacggcgctgggaaccactcctacggcaagccttaaccgtattgcgaacctgaacacgctgttcccttctgcatttaaagaagtgatggttgtcgggcatggtgaaactaaagtacaccgctatctggaagcgaaagccaaatatggcaatcgtctggtttgcttcgttgatgatcttgcggtaaacttaaacgaatgtcataacgtcatcagtcagttgccgttattccatatgttgcgtggtgaacgtgaaaccccgtggtcgcctcaccagtcagttaaatcatggtttgaaatcgaagagaaattacatgatcttacagattctaaatgaactcgcttcgactctgaaaatttcagagaaggaagcgatccttaaacgtaatgcaggtaatgaactgctgaaagagattttccgcattacgtacacgaaacagattatgtttcacattaagaagtttccgcaggtggacggcaagccaggcacaaccccgctatcgaatgctatcgcggatttgatgtctgatttggcaacgcgaaaatatacaggcaatgcagcccgtgatcgtctgctggatatcgtatcatcggtgaacgagaatgaccgcgaagtgcttcgccgtatcattaaccgcgatctggaatgtggtgctggtacaacgttaccaaaccgcgtatggaagaaactcattccagaacagcctcagtgcctcgctacgccgtttagtgagaaagccttaaaacgtattcgcttccctgcttactcgcagcttaaagccgatggtgcgcgttgtatgtccgatctgctggaagacaagatccgcaaagcatcccgcgcggggaatgagtacgaaggtttggtgaatctggacaaggatctgaaaaagattcgtgattatctgggttatgatgttgtacttgatggagaactgatttatgtccctgctgaaaaaactgctgtcgttccttcaaacagagttccatttagtcttgctgggtttatgggcgatgacgacgattctgtttctgaccttgtggcagatgttaggcgggaagctaccgagaacgagacacaagcggaagcgaaacgcgaagagggcaacgggattgtaaacaaatccctgaaaggtactatcagcgacgaagaacagcgcaatatcgtttatgttgtctgggatatcgtaccgtatgaagtatactatggcgatgctccgagtgttcaaccatattgcgatcgctttagcatcctggaaggtgcgctggctggctctggtgtaacatcggttaagttgatcccttctatcctggtacagaactacgcggaagcgaaaaaggattacaacaattaccgcaatgacggtaaagagggttcaatcctgaaaaacgttgatttcaaatggaaggattcacgcgttgcggatcaggtgaagttgaagaacaaaaccccgatcgaactgcgaatcatcgacgtgtacgaacacaccaaagaacctcataaggttggcgggttcgtggttgaggacttatcaggagaagccagaacgaacacaggttccggtctgactgatacggattaccgatacgatgaagacggtattaaccgcgtgtacatcccgttagaagaacgtggtgaactggatcgcgaatacatcatggcgaacaaagatgactatatcggcgctatcgtcgaaatggaagttgacggactccagaaatcgaaaacgcgtaagaagggcgaacctgagttcagtttcttcctgccaatcatcaagaagattcgacgcgataagaccgaaccagatgacattcacgttatcttcgctgatctgttttaaatagcactttttgctaaagaagccccttgcatatgtgaggggctttttgtatattacacacatcgaaacgaaacagacaaaaggaacatcccatgaaaatcactaaagaactcgaaggcaaagtaatcaacctggcagaccgtgcgcgttttgaaaagctggcgaatggtggtgagtctttgggcgaagcggtagcattattcgaaagacttcgggttaaacgtgttgttgatggttgggttgttgctctgcctgttgcagacgaagacaaagcagtatatgacccagttgcagattcatgggatatcgcaatctgcttagttaacgttgaagtagaactttgcttcaaagaagaaaattgaaaatagtgcttgcggtgtgtgtagggtaatggtatcttacacacatcgaaacaacacggaaagaggaaaaagattatgtcaatggctcacttaactaagaaagcggattttctggctctgattgctggcatgaacgcaccgcgtttaactcgtcagaacattcaggtgtgggtgtacgacgagaagccaagcactagcgaagttgagatcccgactctgatctattgcgcttccaatttccgtgaagaaagctacatcgcagcacagaacaaattgtggaaattccgcgattggatgaacgaggcgaaaaatggttgatatgagtaaagaagccgttgaagcacgggttgcggaagcgctgaaagatattgatttcggtcgcttccttgataacgctccaacgataccggatacaatctgccttaattgtgggcgttgtgttatggttggaaaatgctgtgataacccgaatattgttatcatggaaaggaaagaagtttcggaagaagtctgggatcagattcaggaaatcattaagaatccaccagaaccgacgaagcgtttgcgtgaaattattagcaggaataaattatgaaatcagaaccaagtaaaactatccgcctgatccgttgggaaggacaagaaatccgttatgaagatcaggatcgtgaattcgtccatgaaatgcttgcgcataatctgggattcaaaaacgccgcactggtgatgatgcagcaaaccagtgatgaagacacctggcaatgcgtcattctcgatctggataaaaacaaggaatacaccgaagatgaactgtttgcgctcacagagaacgctacagcgcgtcagaagtgcttcatgatcgatatgcctcgcgaaaactacgagaatatcaagaaagcccgtaaacagaacaagaacaacgtgttcgacctgttcatgggctatcatgaagaaactacggcctaagcctcgctggttttgctggtgtcgttcgtagccgctgccacctgtacacattccaatgtttgcaggtggaaatcttttgatacgtcacggatacattcaacgatcagatacttccctgaatattcatcccctaacacctcaatcaatgcccccactttaacatccattcgaccctgattgatatcaaaccgaatacgtttttcataactggataacgtttgacatttcacagcctggaacggttgaccctgtttgtctgggttctggaagttgttctcatataccgcgttcctgttcatggtgatccatgcgttttcaatatcggtactcgcaaggatatcactatacagttttttatccgtcatcgagaaactaaagaaacttgcatcccctaacagggtagtgttatccttatgggtaatgtattctgctttagtgaataccaaagcgtcacctaaaaacgggttacttacgttgaacttgtaagcctttaacggggtttgtgcgaggatctccgtattgcttttcataaagataccggaaccatcttcccacagataacagaagtcagacgaatctacgctctgcccgttgtcacggatgtaatcaaacacggtttcatacgtcccgctcaggcaagccggaggaatacgcacgtttgatgcgtcgatatgcggcgtgatcaacttcatatcgttatacagtgccgtcatgcactctgtaatcgtctgtacggcgttgttactgaacgaacgggaaaacttacgacgaaacaccgtatgcaccggagaaaggtttaggcgcagtatagagcggttcatatcatcggtttcgacgtttgaatacagaacaccgtagtaatgctgttctaacgtttcgttatactggaaggatacctgaataatcggtttctctgtcaactgatagattaactggttatcatagatctgcatcaatgtttcagaagtaccgttaatgatggttttctcactcattgagacaagggcaggtaacaattcaagatagacgttatcagcgaacttttcatatgttggatataatttaaccgacacgacgcggtttataactttactggacattagacatcctccctttatattctatttactaaatagtaaatatcgggatacttgaggcgatcatgaaagagaagaaaaacacacttgataaatttatggttacgcgtttaaacatcaagaacagcaaaaataaagtagtcacgttgcctactggtgaacaggttacgatcccccgtctgggttatcgtcatttcacccagattaaagcaatgaaagacccaatgcagttgcttgagtatatcatcaaagagattcaaccgcgcgaattaaccgcagcagaaaccgaattccttttgattcacctgcattatcataatgacgataaagcaatggctgtattgaaagagatcggtattaatctggatgatatgaaaatcagcgaagctaagtatgaacatacttttgataaccttcgattggtcttcaacaaaccgaccctaatgctggatgatctggcattactgcttaaagaagcgtatgacaacgggaagccgatcgaactgacggacgaaaaccgtattcaattaattaactgcctgtatcgttatgaatatgacgatgtaaaacgtggcgtactccaggaagtctatattgtgcatgaggggaaaaccattaaagggcttaacatcatcggtgaatgataatggctagcaatccatattttaacgaagaacaacgtcgccggatgcagaatccaccaaaaccacaggcgcaaccgactgttcgtaagatccaggcaacgttagataaagattcgatgcgcgagttaaaggatatcaatgataatacccttgaaaccgcgctgaatacactggacatcaaagacagtgtgaaatcctttgaggatcgtttcaaagagaaattcgctggcttccaggaacaatacgaacaggatcagcaaccacttgctgaacagttgcccgattttgttgggccagcgcgtccaccatcattaacagacaacagcacaaccagtgttgataactccgtcagtgtatcgaaccagcataacccatttgcgaaaatcgaaacatacaccggaacgattgcagaagcaatcaccaagtttatcgaactcgctgaaaagaaaccagcccccgcgccggaacctgaaccagtaccggaagaggaaccggaggtcgatcgggacaagaagaagatccgcgataaggataaagacgagaagaaattcagcaagaaagtattgtctttgctgggtgcaattaaggataatacatccggtcttctggctcgctttatcggttattctctcgaagcgctggcgaagtttgcaaaatggactctgattatcggtagtatcgtatttgcgatcgacgtactgagtaaggttgttcagaagtggttccaggatattcttgcagagggtgaagcctcgaaagaattgtttggttcatacttcgggaatatcaaaacccttgctgagaaaatcaacgaaggtctgcaaaacttcgatatgagtaatttgggcgaatcgctgaaaaacttgttccttgaaccgtttaaggttctgggcgataccatcaaaaccgcaatcacggaaggtatcggtaatctgatttacgctctgggtgaatataccggatctgaaacgattaccaacgccggacgcggaatgaaagtatcagcactgcgcgacaaacaaaaatacggtcttgaaattgatcccgatgacctgattctgctgaaacagcaggagatccaggatcagaatgataaagtggttgaggcacgttctaaggttgtcgaacaggttaaggctacccagggcgcattctcatatagtttcggacagcaaacagacgcacagaaagcattgtctaagcaattggaacagatgcgcgatcgtgtggctattgaagaaaagatcaccgaagagaagaagaaagaactgaaagcattgcaggaaaaccccgcactgttacaggctgaggttgataaagagaataccgctaaccgtaagcgcgtggacgaaaccaaacagatcgaagccgcgcaagcgaaagcgaaacctaaagcggataatgaattcgatcagggtgatgaaatcctgaacaaagacaatctgacgggcaacgataaaaaggtaatggaaaaactcatagaatcgcttgaagagaaaaacaattcgaacaagctgaatgaggacgacaaagaccgctatcgtgatatgatctcccgctggcaggaaaagatcaccgcagtaccggaaacgagtgcaagtattgacaagcaaccggaagcagtgaaagcccctgttcagcctacaacgcctaacagcgttcaggtcaacaacaaaacagtaaacaacacggttcagcattcagtacaacgaactgaccgtaaaccattgattgcattagcttaaaggaaatttaaatgaaaattacagtattgcaagacactgtacaatcatttgctgaaatcaaaaatgctggcatcccctctgggggtgctgcaacaactaaaaacgcgttgactcaaccgatcgtaacagcggaatttccttcccaacgtgcagcaggtattgataacgcttataatgcatcaagcctgtataataacggcttgctgttcacagcatatgatttcacgggtggacttgcaccaggcagtaaagacaactaccgctcattacgtcaggcagcacagaacgcgcaacagatccttagtgctaacactgggaacgttcgatacaaacaggttttgaatacccgtactatgggtacacttaaccccatttgtcaaatacttttaccgcgaagcctgaacgataacgaagtgaactcacaccgttatcaggatgcaaccgatagtattgttgctaaaggtttatcccgtgcggtatcaaacgttatctggggcgctgtagaatccgtttctggtggtattctggcagaccgtagggaagcaatcgacatcggtacgaaagcagcgtttcaaggctctgataagcgcacaaagatgtattacaatacattcgttatcgaaagccgttatgacctgctggaactgattaaaatctattacctgttcacggtgctgggttatggtactacttcgggcggtactccagcagaattagccggactggttaaacaagcgtataattccagtgcttcgaaggttgcaaacgtttttgcaccatcaacaaaccagacgacagcaagcgatttcaacggcagcatcggggatcagattgttgacttcgtatcgaacgttgaagttattaaatcgcctcctgtgtggtttattcgtgacttccagacaggcgacagtttgcggttccctcattccacgttcgggccagcaggtattaccagcgttcgtttcgggcgtacaatggacaacattgtaaatacgttgagagaatcaccgaacaccccgatcgcagttgaaatcgaaattcagtttatggaactgatcgatatgcgtcaggattcgatttttgatacgcagtattaagggggaacaatgttctatagcgtagatgaatttttgtcaggaatggcaaatagagacttccagcgaagcaacctgtttagtgttgtattcgcaaccagtccagcatcacgcattctcgacagcacgatcgggagtatccgcgatactttaattgatggtactatgagttccattaacgcaaataacccgaacgagttcatgaacgctattacagggggcgtaagcaagttattcagctatacagttgataaagctattatgtccctgaacaaaacaggtttcagtaaaatcatgggggcgttaagccctcgtttaattacttccctgtttggtgatagtgtttacggacagatgctaacagaattccgtgacaaaatgatgtataatatggggttgagcatcgttggtgttcagttgcctggtaaaacactgggttatgaatacgtgtataatggcggtgtaccccagatccgattcacccgaccggagaatggtgaattatcgctaacgttccgtgtggattcagaagcgcgtaacctgaaagtattcaacgaatggttatcagctattcgtgatgatgtctcaggccagttcgcattcattgatgaagtatcaagcgcgatccaggtaaacttacacaatcgcgatggtgtcccgcacagcacgtatgtattccagaagtgtttgcctgttaaagtcagcaacccagaactgagttatgaaagcaataacgaaatctggacattcactgttgactttgcttataaaacaggctggcttgttgaagcagataaagaaggttgggacggattcaaacaatcacttatcgaaggtgcagcaattgccgttcgtggtgtggttacaggacaataaggggcgaaagccccttttgaggttaaaatgattgatataatccgcgtaaaactccctggtggagtgaagcgattccctatgtttaccgtgcgcgatcagttgagtttcttactcacaagcgcggacatggaagggaagacgctcacagaacagcaagaaatgctggatgaaattttagatattctgtatccgggttattcccgcaccgaacaggaaaacattttcactaaggtgtattgtgtatcgttcggtaagaacgcaatcaagatccgaatcaaaggaagcagcggacaatcagaagcattcatgcatgtaactgattacgttttgcaaaatgaatatgcccttgatgattcgcttactctgggattcaaattcccgaaacatcgtaacaacagtgaacaattattccttgaatgtatccagtatgtcaagcaggacggcgaaagatacgaatggaatgcattagacgaggacacaaagaacgcgatcctggatctggtgtctattgaagatatggaaaatatcgttaaactgttacgcaagtcctgtcatgttaccgtgcgtgatattgagttcagcgacttattgacactgtacaaaatcctgttcaacaaatcagaactgaatgagttcttcaaaaccaactatttgttaaataagaataccgtacagattgaacctataatgaatggaagcccgatggaacgttcaatttacgttgcattgctggcggaagacttgaaacgaaaagagaatgcaaatgcgtaaacatacaccccgacatatcccaaaatataatgtgacttatcgcccgttaaccattggcgatcttgatgacacggataacttcattattgaaggtgatgtgttcaagcatcagcgcgattatgtttacattatggctctgttcgacagtatcaacaaagagactgtagatctccaaatcaaatgccctgaatgcggggaactgattaagtttgtgctcaatcgtcatcatatcatggtggatgaatatgaagaaaagctgtacggcaatgagatcaagatttcagtcgaaccacaccgcaccggaaaggaagagttccccgaactgattaagtttgtagtcatcgacggtgaacaaatcttatgggatgactgtaaagagtcagagaaagaagccgttctggatagtatcgactatccggtctttaaatcaataaatagcgctctggataagccagcaatcgttgcaaacattccggtaaggtgttcgtgtggctacgagcatatcgttgcactgagaggcttagaggcgtttctaaaggtggttggataaaatgggtgttaaccttcgcttactgtatagcgatatcgatcccaacttaacaaaagactggaacaatgacgtaaccgcctcgaaaggggcggcagcggtaaagaatagtctgatcggtatcgtaacaacacaaaaaggcacacggcctttcgatagcaactttggttgtgagatcggggaacagattttcgagaacatgaacccgctaacagcggaagcagtaaggacttcgattgtctccgcgatccgcgcatacgaaccccgtgtttacaatctggatgttgaagtgattccgcagtatgacgaaaacgcaatcaccgtgacgatttactacagcatcattgatgaaccggaagaagtagaaagaatcaaactccagctatcatcctcataacaaaaagccccgaaaggggcttttcttattccatcacgatccagcccattagctgttgatatcgcaattcgaacggggtgatgaaagagcggttattgataaccttcgtcccgttgtaggacttaatcacttcctcaccacgaagcacatattcatatacttcgtccatagtgtcgtaacgcacttcttcgacttcgaagcagaagttggaatattcaatcattccgatcttgttcgcgtaacggcgttcgatgcagccctgtttttcaatctgagtgatcgcagtatcaatgaactgcgcaagtgcttgcatgaaattaccacattcgacttcacgacccccgcttgagatagccaggtaaacgcggctcaatccatcattgccgatgtaaccgatacagtcaccgccaatatagacagaccagactttacccatcggccccatacccatacgattctcactacgagaaacacctttcagtaacagtgccatgataccgccgcgaacgtaattcattttcatgataagccccttattttttcaggttgattaaccaagatggttgggtttctaaactaaccgctttccaagcatatgcaacactataaccggaatacgtctgacatacaacagcattttcatttaaatatttcactttgtgatctgcctcttgttcatccagggcagcacacacgatattcttttcatacactccgccgtttggctggataatggtttcttcaatcagataaacgctgttcatgctaattccttctcgattgcttcgatgatgtggagaacgtaaccgttcagttcttttgctttatcagcggcttcaaccataccgtaacgaggaacttctaaaacgttcgcaccttcgagcaggttgctttcgatgtctacgattacgtagctctcaccgattactgcgccttttctccagtcttttacgaacttcaccattttagctttcatgttctcgttccttttggctgttccgtttcgatatgtgtaatataacaaagccctcacgcgaacgcaagggcttttttggattaactgaatttattatagagagtgaaattaatccctatagaattcaatgctttacatgttgcatcaagatcggttggttcgatttcgatgatgtatttcaacgctgtgtttactggaatggtttctggttcttcgaaagatgccagggttggcgctttcaccgtttctggttcagcaagcgcggttttctttacgtcaaacgcttctttgaacttgttgatcctttttagcagatcatcaatcaattcgatgttggctccgtcgaattgtttggtttgttccagcatactcgtaatctttccgtatgtagtgcgtctggtttgttccgtgtaattccctacttcataacggtcgatccggtcgatgattgcccgaacatgtccaagattcgcgcgatcgaaatacgcaatcaacttagattttctgaacacgaacatatatggagcattaccgacaatgtaatgagttgccgttagaccaaaactaggatcgatcagaattttaaccgtgttgaaatacgggattaaatttatttcacgttcaggcaaacggaaaacttcatctttaaagttcttcccaatccggtcgatctcttccagagttttacccatcatcgacgaaattatttcaatttttttagatacataagccatttttcaattctcatttaattaatgcataaaagatttgacgtacttcacgatttcttcacgacacatatcgaccggagtatcctcagcaatagcagcatgacagaagatttcaccatccagccagaacgatagcatgtactgaatatcccgaccttcgttttctttctggtgtttcttgatgcgattaaatgcatcatccatgctttcggtagctgtaagcatttcagattcacccgctacagcagccatttccccagcttcatcactgaattcgctttccaattcttcccagtatactatcgttatcatggattaccccaaacagattttacatttacagagaggacattccgcctctttaacgcgcaagcgctttgttgctgttcgcttcgctgtgttgtgatcatacacatgcaaacagcgataacagatcaccaatcgtttagccgtcataaccaccaccgcaacgaacatcaccttcaatgaacagttcgcggttatctctcaggagattgtatttcttttcgagttccggcccgaatgcgtccgcgtcgtcataccagtcatagttataacttccggtttcctcgtcgtattccggttcgtcgccgcactcattgaagtgaacgattttaacatcatccagattcagttctttcagcttgtcccagatgcgggttatttcgacgctattacatccgaacgcttccagtgtgattgtaccgtcatcatgtacttgaggaacaccccagcgcggacgatgatgaatttcggtgatcatatccatcagcgattcaatgtttgactcaccgtaaatctttgcaacttcctgttctttaccagggcggacaagtcctatcccgataatgaaactactgcttgagctattgctcacgaacccagaacggatcttcatcgccttgcctcgtatttcgcgttatctgcgattttctcatgatacaggttgtatgacaacaccagcgggatacaagctactataagcccgatgatagccagttgatattcgcgtttatcgaacgccatgaatgtaatcgtagcgcccagaataaacacacctaacgcaatgatgaagaataatgtcattttggcagggtatccatttcacgagattttgctttcaggatgtcaatcacagtagtcatcgcctgttctacatcaccatcatagtgaaccaggaatgttttgtgaagtcccatgatcagacgattgatgatataagccatttctgacggtaacagtttaccattctggcgatcgtactttccaaacaagcggtagagttctgcgctgttgcctggcttctcaatgctgaaattatgcatcccagacagaataccatccagatacagaacagttttgttatcactacgcaggtgtccgccgaccttgtagtagttgctgaatacatacggtttttcgcggatatcttcgatatcgaaatcaccatgatcttcgatgttgccaacatgggcgaagaaatgatgatcttccagttcgagaaggattgcaccctttttgtatgggaatccgactaaatcgatctgccagccattttcaccgacaaatacatcatcaacaaccacgaaatccggcagcataggcgcgtatgcgtggttcttttcgttgttttcacgataggcttgtggttcggacagatacaggatatcgccttttacaacttcaccccagaatacgttacgtgacatattattttcctcaatatgccccctttcgggggcggtcattgttagattttgacttctttttcttccaggacgatttcacattcgaatgatgtggtttcccagactttccagaaatcggatggaatattatcttctttcggaagaatatcttttgcagcgatagaaactttggtttcttcgaagtccagatccgcgaaccatgcatgggctactacaacaccgtacattacgcgacttaaacgggcattcagtttacggacttcctgaatcgttgcctttgtctgcttatcaagatactcgactacctgatctttgtcaagcgcatccagttcagatttcacctgatcgtaagcccacaggataatcaggtcgccgttgttcagtttcttcttaccttcgtcacgtttcgcgacggtagccgctacagcaggaagggaggaaacacccttgattttcacgttcagttctttcgacatgtaaacatcagtcgattctgtgcgctcaaccttcggagagaacccgtaatcacgaataccctgttcagacagccattcacccgcagcctcaccaaagcgctgtttcagcccttctgcgttgcgcagtccgatcgcgttgtcacggaagaacttcataaccttctgacggcctttcaggatttccagacgcacgttatcagtcacgaactctttaccgcttaacccgcgagtcatgccacggttaaccagaggcagagaggtaaagtctaccagaaccgacatacgatcatcaccgattttttccagcggcttgatagtcaggccagaagcacgaaggtttttcagtgtcggaatatcggtttccagcggcagaactttaacgttcacgataccatctttaacgatggtgaagttacgcacctgcttagtttcgactttttccggcagaccgaattctttctgtttgctttctgggatagtcacatacccttccagatccgtgttgatggaaatgttcggacgggaactgttacccaccagatgtttaaccgatactttggttgtggtttgggtaaatttcggtgtccagacttcatgcgctaccatttgcgccgccagtgctttacgttcttctggggttgcagcgtttgcgatctgttcggtcagttgatccagtgtatcatcttctttctgtacagtctgacggcctgtgcggttatacgcccagtgctcagaagacaggtcgatcactgtgtcagtttgtgccagcagttcgagcgcatcaaccagagtgaacgcgttttcgtctggaaccatgttgtaatcaataccatcaacgaaacgctgtgatggatctacaacagcctgtgcaatcaggtctttcgcgttggagtagtcctgtttggtaaagcagttgtcatacgctttgatcagacggacatcacccagcttttgaagcactttccatgccagatcagggttcattgtgtgcagtgcatgataaagcacgacatacagaacttgctgttcgctggcgatgttcggatcgaatccgtcaacatcattaatagcgttttcacccagcgcccagatgtttttgatgtgttctggaaccagcacaacaccgtttgcagcgttcaggacatacacgcgcccttcgtccaggtagatcgcatgggtagcatcagcaactttgacttcgatacgcgcggaagtctgcgcggtgatgatttcgttaaatgctggttcgtatgcgtcgaaaccttcaacgaatttgtgcaatgcgttggttgcttctgccattttttccagcagaggacggtttacataataaccgtattccaggaacgcgatactgttgaaagtcagtggcagaaccgcacacgctttcagaatatcatcggtacgccagcagttatcataaccgtctgtcaggaagatcaggctgttcaggttgccgttttcagattgcagatcggtagcgatttccgcagccagattcaacggctcaacaaagccagtacaacccgtaggtttcaggtaacggtcgatagccgcgcagatgttagacaggtcagagacattgctaaccttctcaccacggaacaccgtgccgtaatcgcctttgctggagaagtacaggatcgaaacggtgtcatcctgtttaaccagactcgccaggtttgctttcaggtgtttacggatcttaggcagttcgttgtacattgaaccggatacgtcacacacgaaaacgtggtttgtcggggttggcttcgatacagcgtttttgaattcgatatttgtgattgacatttaaattttctcgtatttgaatttttctaaaatttcgttaactttattgcttactgcttcgactgtacgatcacacccgaacttacgcgccaggagttcaacgtattcatccatcgtagtgagtttggattcagcaacgtcaaacgcaagcgcatacattaccggattccatacccgaacgatttggagagtatactcgttcagttcaaatcgttcaagatattttcgcaaagaaaatacatcaaacggtgcggggcgatcctggctaaaggggatcgactcccctaatgcatagcgaggcataacaacacaaacttctgttttcagtttattatccatcagtgatgactctttgatgtgtgttcaaggttacggaagatgtttccatgttccagttgagttccgatcgggccgcattcatcggagtacgtgaattcaaagataaacacgccgtcctgattgccgaacttcgtgttgtattcttcatacaaccacattttgatcagagcgtctttctcttctgtgtccagatcgtaccagtctcgcccgtcatacgcaagcgcgatttgagggtttgaacggtagcgggtttccgcgttttcttcggtttcccagtcatagcgcttatcgtcgtagaacgattcaaagctattacccagatgaccgcctaagtcacgatgaacgtgattgaccacttcttccgctgtcaacggcggatcgtagtaaccacaatcagggacgcaatcgcccatcatttcgcgcaggttgtcgatattagtcggatctttcgggaaccggacgatgaaactacttgatgaactattgctcacaaaaccagaacggattttcattttacatcctcaaattgtaagttttctttggttgcgttcgcaatggctttttcgttgctcagtgttactatgcgcagacgttcgccagtaaagccgtcgcattcagtgatactcacccagtcaaaaggtttagccatttcaatcgcacgttccagcgatacggtagaaccgaccaaatcactaaatgtatagtaatcttcgcttaaactttcaacagtataaattttcatgatactttaccctttgtttcggatttcaggacgatgttactgtaaggatcttttgctaccagttcccacaggtcgccaggatgttccccgctacggtagacggatgaacggatgatttcgttaaacttgctcagggcttcgtcgatgtcgtcatacccgcgtttgaggggcttacgattgcaacgaatgaagaacatttcgttggtattctccccgcgttcggcgtttttatttttcattcgatcaccattttaccaataacttcttcgtaggtcacagggttcggttcataaccgttagcgcctattgtatcgcctactctgttccccaccaatacagcaaccgcaactttcttaccgtctttccatgcgatgaattcgagatcatcggcaacatacgggaaggtttcgtgattgttcactgcgtcgatacagtccagaatagtatccgatgcgcaaatcagattaccaggctcacaatcaacaagacattcaacagtatagatcataataacttcctcacgaaaaaagcccctttcggggcttgattaatcagtgtccgaacacaccacggatagactctgcgaaagcgtacagttcagggtttttcgctttcactgtttcgatttgttccaggatgtaatctggtttgtatttcgcaccgaaccagcagtaagagaaagaacgatcccacatgaacacgttgtagtattcaccgttacgcacttcaaccatcacgtaacctggattagaacccagcgggtaatctttcaggagattgaatttcgcaccagcgccagtacatccgttaaacaggtcattaaaagtcatggtatgttccttttcagtttcgtttcaacaaggccaatatattacacttcgttaaaccatgcaagatatttcttctcttgtctgttcaaaacgtcataacaagaggcgacacaaacggtttcccacacaacttcatcgtaagcattcacgaagcgaatgatcagagttttgccattagtcatcaaagccggagtgaacccaagttctttaaccgcttttactttcttctggaataacgctttagtcatgttagccattttgtgtctcctttgtttcggtaaagctacgataccactatcaactaccggatgcaaacacttttttgaagaattttgtttccggtctttctttgtacggacgcattaccaaatctttaccgtccagcacggttggcttaccttcgagttcgatcaggatgaagttgcctttctggtacttcaatacgccctggctggcagaccattcatcattatcccagtggttgtaatgccattcaacaacggtatcgatcgggatatcgggttgatttctcatattctttttcctttgttcggatgcttctttcagttgtcgtatttgtgggatcaacctttgtggaggcacggtgtctgcttgtttcaatgcctttcgaacttgttcaacaaaccattcatattttggacggcggttgagttcttcacgcaatcgggcattctcttgttcagcaatacccgcgcgttttctgtaatcatttgtcatgacagaacctttttgatttgtttggctatcgcctcgatgacagggacagaaacggagttacccgcttgtttgtatgcctgtttcttactcgatggaataataaacgaatctgggaagccctgcaagcggaaacattcacgcggggttaatcgtctggggttcttcccgtcctgcaataccagacattgaacaccgtctttgtaatactgcgctgttatcgtcccagtgtgcgcagaatcgcttgtgacggcctgataaccgaaacccttaccgtttgccttatttcgttccttacgctctctaaagcctttccatgcgttatctgagagggtgaatgaatcatcagcatcttcgaggatgtcgcctacgcgtgtaggtgtacgcgggggaacaggaaatgaaaagaatacatcatccaggaagcagacaataaacacgcgttcccgtctttgtggtagtccgaaatcctttgtgttcaggcgttgatagaatacgttgtatccttcggcctccagaagcccgtaaatcgttctgaacgtcttccccttgtcatgggttagcagttcaggcacgttctcaaaaaacagcacacggggctttttagcgtgtataatgcggaggatttcgaagaacaccgtaccgcgtacatcatcgaatcccagtttcaatccggctttactgaacgcctgacacgggaaccccgccagcaggatatcatgatccggtactttgttttcatcaatggcgaatagatcaccctgtaggttatcatcgccccagttttcgatatatgtttgctgtgcgaacttgtcgatttcagacgttaaaaggcattcgacaccgccgaacgccttatcaaatcctaatcgaaccccgcccacaccagcgcagaggtcaattattttcatacgtcaaaatcaatctcgtcaattttgtatgagttttcatcaatgtccgcccatagggttacattaacgtgtttgctatcttcgtacaactggcgaccatcaatcccgcccgtgtaattgctttcggtacgttcagtaacttccagtcggaggctatcgcgcatgatctgaacaacagcctgttccagtgtaaccgcgtctgggtttttggtatcgcccagtacaacatctttaacgttcaaaataacatcagtcattagtgccactccgttttaataccgtgtcggtatgcgtcaatccccagtggggtaatcagcaaccatgctttcgaattatcgtgataacccgttacccttcgagcgtaacctttttgaatcagggcatcacgccctgatttgctgggtacgtcatcgaaatctaagtctagcactttagttgcgtatccgtaaagtttatacagaacatcaatttcagcgccggacaatttaggatacatcatttgtaataccccacaacatgatcgctgtatacgcgttcgatgaaatcgttccagaattcgcgatcaacttctttcggatatgttgaaatcgctgcaaggcgttcgacttcacccatgacttcttccagtttttcctgtacggttgcgaacggtacgccgccagctttaaccagtttcaggaatgcgctatcaggcagaggataaacgatatcaccatctttgtaaatctggatcaactgcataccaccgcgcaacgcgtgacttaatgctttccagtcgatcccgttgttggcttctgcttgtcgtgcgcgttctccgtattcatcccagagtttatacacagacttacgcatttcatcggctttgatcgtgaactggaatttacgccccagcacttcatagaagtcctgacaaccagatttcattgtcgtgtcggtaacgaatcggcagaactcgtttgtagggaaacgatccttgatgtcagacactttcacttcacgcgtatagcgtttcatatctggcgtgaattcctgaataccaccgatcgtttcggtttctttcagtacatcgacaacttcgcgcagtgcagccagtcgggaacccttcacgccatatttcgcggcttgcttacgaacataaccgaacaagccagttagttcagtggtgtaaaaacgccagcggttagcgcggatatactgccagatttcagagttagcgatcagcttgtcatccgaagcgtgaagcatatcgagcgctacggtatcaccatcacacgcaagactaatgaacttagtcagactatacaactgacggtcaacgtcgtctacggtgtttttagagcttttatcgcctgtgctggtgtcaatagtcttcggggctttccccaggagaatatcgcgcgggtgcgggagaaagatccctttatagtctttgtcgcttgtcggtgtgttcagtccgtacaggtgagaaccgaacacggtttccattacagttttcaaaattcaacccccagggtttttgcgataccgcgcagttcagcggtagtgatatttggtacacgcgttacatgtccacgaccgaacgcgtctttgattttatcagtaagttcgacacggtacaaatgttctttgtattcgtcttcgctgtgataaccctgtgtatggttattccagtcattagcgctaccagtttttcgatccagtcgctcaacacggaaatctttgatatcggtaatattcggatcttccgacgcatacagatattgacgggcaaccttgatcacatgcagggtgcgcggtcgtggggtgttgtgatgactgtatcgacgaataccaggatcaaaaagggtatcacccactttcacatcagttaaatctatcatttcattttccaacgttttgacttttcacagtagaacaccggaagacgtgccagaactggcttcactacgtcttcccctgtgttcgtgttatgaactacttcgattgtaagggattgcccttcggacggccttacgatgtccagttccaggatctcacgattaccctttgtattgatttccgctacgtagtaatcgtgtccgttgatgtttacgacatcacccataataacgctaattgtgtgaatcatgagtatgcaaacttaattttaacattcagggaatccagcaggatcgcatcacgtccatcaatgatagtcaatcccatgtatttgttatcgtctgcgctcttacgggagtacatgcgacaaaccagagaaccatcttgtgcgatgtattcaacgtggtattcacggcgttctgacgtgaagatgtcaccaactacaacaggacgatcaacactttggcgtttagtcccttcataggacagtttgccgttaccgtctggggtacattccgcgcctttcaacaggatttgtgtcactcggacagattctacggttcccgcaatcaacattgctggatcagcggttcccattttcaggatcagcgttgaacttgttttgtatcgtgatggttcagtgacgaacacgtaaaccatatcgttcttatcacgggcaacagattgcagcgtgaattgcatttgacccggaatacccgacatcgcaatgtgaacacgattaccaggttccagcgccatacgacattttacatcagtgatcccgctaagggttgctactttcatgatttaattccttcaaagtcttcattagatttccagtacacgttaaagttacggcaatcgtgatcagaagtcaacgtatatttttcttttgttttctcgtcggtgatcaccatcgtttcattttcgatggaatccacgccatagacgaacactttatcaccgcgcttattcaggaacgcgtcacctgtttgaatcaactgccagcagttgacaggtaaaccacccgcgcagataggacgggttactaaacagtaagggtgtttcatcaatcagccagccttatattgtttggatcaggaacgaatgtatctttctgggtaatcatgaacaccaggaaagcagcgacttcgggatcttcaatcacattgaacttgcgattgcctttccaacgtaccgcgattttaccatcatcgagttttctgatttcggctacttctgatttcttgctcataattacccccttcgtttcgatgcccctaatataacaaaagccctcacgcgaacgcaagggcttttttcatcttttatcagagtcccgtaaacgctacgataatctgatagtggtcatcgaagaactcaccacgattttgtttgacttcgtgcataggcatccagaacgcgtctaacgcatcgtcagaaccgcccataatacggggcagacttccatcattgttaggttctaacttgatgtactgcgccacagtcggttttgagaagtatacggaacgtttcggatgatcgaacagcatcgaattacggattgaaccacgaataaccttttcaggaaccttgattcgtacctcttcgagcagttcgcggattgcacaatccaggaacgtttcatttgcgtttttgtgtccaccaggaagggctaacgcgtctttacctggtgcgaacttacgacgaattaccagcaggtgattgttacacacaaccacactatcacccgtgcagcagttcagcgcgtcggggtatgggtagtttttgaatttctccaattcgctttcccatttctcgtattcgtagaataaacgccagaacgtgtcttccatcatccatttgtcgatataatcgacggttgcttgaggaacaaagcgcaacagtttcttatcccatccgtttttgtggttgaagataatcggacgcagatcggttgctgatagatccttgccgtcaacctgaacaggatcaacaggtacgtgtgtccatccgaacgctttaagccagtatgaacccgcatctttttcgtaaccgtagatagcgattttgtcgcctttggtttccctgatagcagtacgaacagaggttttccatttctcttcgttgtaaagataatctggaatatgttcaaactgaacacgaacaacatcttcgatcgggaagttagcgtttaaccatgagaagatcatcgtttgacgctcacgcgctgtcagagggtttaaaacgttagggtaagcatatgctgaacccagaaggatgtaaacgatctttgcttcttcgagtgctttacgcaccattgctgcatgaccattatggaagggttggaatctgccaattacgacagctttatcaaattgtttcataacgtgctccacgtttaaaggttaatcataaaacagacgcaatcaccaatacaccaagaaaaccgccaataaagccgaagaatagcgaaatgaagatagtaaggatgatctgttttatgttcattatagtattctcgttttaggagtcaagcccccagagtgggggctttaaaaccttatttacgagaatcgaaaatcacttgtccatcgtaacccgcacccattacggtatgtggaacaccgccctggtatttctctgcgcgtttcatctgaacgtcaagttctttccagcgaatcatttctggtgtaatggtacgctgcaacacggcgttcgcttcggcttctttcttagccgcatacagacgggcatcagcatcacgctcgttagcctgtgcagcattgctacgggcttctttatcggcaattgcctgaacaactgcctgttgagcgatttgctctttacgtgccagttctgctttttctgcgttcacctgttcttcacgaattttcgtgttttcaacctgtttcttaatcgcttccggcaggtcgatgtcctgcaagaatacctgtttcacggtgtaaccgtaaggacgggcatactcttcaacttcctgctgaattgcgatctgtagctggctttgaacttctgcgttatacagatcctgtgctttcggtacagatttaccgaactcacggacggtagacagaagtttttcggtcacgtacttatcaagcgcctgatcctgattacccgcgttgatacggttgatcggggctttgttaccatcgaactgcaacatcacggtcatatccacagtggatttgaatttatcctgggacggaacctgcaatttgtcaaacttcattgcgatgtctttggtgttgaatacctcgaaatcagccagtgggtttaccaggtggaagccaggcagaacaggcttcggtgaaactttacccatgaaggtttgagtttttaccgtaccatcctgaacgatagtgtacgagttcggaaccagccacagtgcagcgattacgcccagagcgatcagagtggttttctttgggttgtttacgatagtgtttaagttcatcattatttccattgggtttatgtttcaattcgatagttattctatcatcactttttcgcgtgtcaaactctttttaagaaagttttgtcagcttgtaaatcgtttgatagcacaagcctttgatctcgtccagaatgttcttcaatgaactatctactgaatcatagattgtgtcggcttcggttgctattttacggagatacaccaccgtgtcaagcacattttctgtttttaatacgggtttatatcgaccagtgataccaatatgaatttcggtgaatttatcaaccaaatcctgcatatcttcgtaaaaactctcaaacgctttatgttgagaatacgatccggtcgcaaagtgtgcgctatgcatgtatgttacagacatcagacacataccgataaaggcatctactttgcttgagttatcacgatctgttacttcgttaaatgtttgcatctttcatcccttacgaacgatgaatagtagcaaattcgtttgccaccctatagcccaggtgtttacattctggttcagtgcggcattgtttttgctgccattttcgttccatatagttatagaacaattcactggtatttacactgggagggattgtgtcaagatagacctgtagcgctgcattgatgtaatagtcgaactctttcgggacgacagtatttcgatcagcatgtgatgcaggagacaagattaacaatccaaacatcatcgcttgtgatatgcgtttaatgttcataaacatttctctacgtacacacggatcaacaatagatccgttcctgtatatatttatagcaaaaaaggggcgattcgccccttatgtaaaattagtctaaaaatacatcaagttatctcataccagcataagctacgctcaaaagcgcggatcttatttgcgttctcgatattttcatcccatccaatcacgccagctttcatccggcgtaactcctgacgcattttagcgcgtactttcgaatcaatctttttgactgcgatcgaaagcatcgcggagatatcaccatgagctttgttaccgtcacgattcaggtttttatcgaatcggatatatgcgcaacctgatttgtgtttccagttggttgagtaccaacgaataccatcaggactttccccgtgctgtgcataatactgtgaaaatgcttttgtctcttcgatctgttcgatagaagacttatcacggactggaacatatttcttacggtaagtacggctcatagtgttctcctttgtttgtctgaatacaccttaacagttcagaccaacattatcaagaagtttttcgtgataatgtttgcgacagagcgaaacgtatttgtcttcggctccgatctcaacctgctccccttcggttacgaagttgccttgtgcgtcgatacgtgcaaccgtagttgctttacgcccacagtgacacattccccgcagttctcggatctcgtctgcccaggccagcaaccagtaagaaccctcgaacagattcaactggaaatcagtacgcagaccgtaagccattacagggatttcgagttcatcaacaacgcgacacagatcgaaaacgtttttcttcgaaaggaattgcgcctcgtcaacgaagatgcaagcaattttattccggcgctgaatgtcccagaacagatccatatcaggcgcaatcaattcacacttttcgttcagcccgatacgcgaactcactgtgtttgatgtgcgggtgtcgattgctggcttatagattacaacacgcataccgcgttctttgtaattgtgcgcgtccgtcaatagtcgcgcactctttccagcgttcatggatgcatagtgataatacagtttagccattgacacgctccacaaacttaatatgattctggaatttaccctcaccttcatggtttttgcatgttttgtttgaacagtatatccaccaatcccactcgtcgtaagggggtttgtcaatgttcatgacgcaaatcaaagggaaatgacaatcccgacaacgaactttttctataatgtgtgcgttagccaattgtaaaccacccgttacccatgagttttttgttacgtcgcgcaagatgctctttgatttccggcatctggatagcaatatcatactcttctttcgtcatggtatgatttgcacaacccatacacccgcacacctgcgcgttacaccaacggagtgttccgtatgtcgcaatcaccttcattgctttagctttgattttgtcagtcatgattataaccgcccatttcgctatcttgtgctttatggatatcaagataccacatgttgattttgcttttcagttcgcccatttctttatccagtccttcatcaacaagacaaagaatgtcaaccaccgttttacgctgtgtgatgttgattttgttcgctttcatggactgcgccagcgcttcacaggttttcaccagtgcggcgcgttgtcctttgattgcggcgatccgtttgttcgctttcttgatcgcccgacctgctttgataggatcaatcatgataaatccgccttacgtggatcaaccgatggatcgaagtgaacgacgatgatcgggtaatctcccgtacactcgtcaataatggcgctaatacgcagccaatcgcccccagcaagccccgcaccgataagaggggtaatgataggcaatttctcaggaaacgccctggcgcgttctactgcgctcacaaagcatgaccggattgcatcataatccacttgtgggccagtaccccagaatttaaactgagtgtatgcattgaagacaatctgaccttcttccgtcatgtagatggagttagtgcctaacttccgctgatcgcctttcatagtcagtgcatcaattttgaacgcaccagggattttgtgcttcacttctttagcaatacccgcgcccatgttgcaataacagttacacccatgaatcaagtgtacttttcgtttcaggaacaactctacagcgttccctttgatttctttaataatcattttcatcacctgtatagtggcggtaagccagcacagccagccccgcgatcacaaccacaacacacattaagatataacctgtgttcatttaaattcatcgtcccatctttgccacgcttccaactcgtcatcatatacagggaacgagctttcgtttggctttttaacgtaataccagataatgattgcagcagcaatcacacacccgtaaaagattactaatcccatcatcagtataatcctatgccagcaacatattcatcaaccaggtaagtacggagtttttcacaacgttccttatttggcgcattggtacagaggttcatcattggttcagactgtaaaaactcatgcagtttaaccaacttctgacgcttgaagaggtgcgcgttttcttcaccccacacataagccgcgtccagttgttcggcaatcacctgttcacataccgcaacgtctttaatgtcacgattattgcagagttcagccagtcgatcatcagcatgtgcaaagccagcaaacagagtgagtaacagcgcaagttttttcatcgttttaccttagtatgaatcttcttcgataggggtataataatgggtttcgcagatatacgcaagcactgatcgcaaactatcgctttcaaattccggcttttgattgcgtttcaggttccaacccgtgaaacacatccagcgttcttccgcaatatcaaaggctagccaatatgtgctgaactgtgaacatgtatgttcgaagatatcgaacagcaatttaccgccgatcggcttcacatatggcttcacgcgttgaagcgatttcaggactgtttcgaggttactgcgatcctcgttcatcgcgatacggagaatatgttgattggtttctgggttatacccgtcgatcgcaagccccatatcctggaagaacttagtcgcatcacggaaaatttcatgtccgctgttcggtgaattgatgtaaaactccatacgttgttttggagtcatcgctcggacacgggaagcggttttgtgatcgatctcgtctttgacctcctgacgggctttcagcaacccgttcagcttttcctgatagggttttacaatcgctcggatttcgtcgatacgttcatcaataattgctaactgctgttccggtgtcagtttagtttccatgttaagcccctacgcgcacaaagcgatcttcaattgcatcattaacacattcgtaaatgctaacgtcattcgggacgtgcttacgaatacccactttcacgatatccatgatctctttgttgctaccccacacgttcaggttgaagtaaacaccgccgctatgaattgtgttatcatcaacgtcaagatacgtatcttgactttcgcagataaacagtttgcgtttttcttctccatatgcgaagtagatactgaacgattccatacgatgacggtcgaccgtgatggtttccacttcaacctttggatctttgttcagttcatctaacacaccctgaatgatgtgcagcatgttcggcttgatgatagtcgggtgactggtaataactcgatgtgatgtgctcataatttaatcctcaatagttggtacacacataataaaaaagcccctgcgaaattgcaagggctttttatcagataatgcgtttttcttctaacagcttcgcggtatggttaaccatgcgagcgtaatcacgggcttctttctttgaatacttgaatcccgcgttgtaactcgccagcgcctttttcaagtcgcctttgtggtaatcaagccagtattccagttcgtgaagtgcatacttggaaccaccccgaagggtttcgagcttattgattactacgcgtttggaatatgatttatccattcgtgcggacgcgctacgggctgttacttgaaaacaaccataagcatgatgattctttttgcctttccctacgttctcacatgcgcgagactcgatccaggcaatagccgctaaatgatatcccaaacgtttcgatgtttccgattcaactggctttgcagttttgcgatcgtactcatttccgatcctgaaagcgtactccaaaacctttttctgctttggtgtaatatcatccaattccttaacatagctgggggcattggctggcgctttcttcattactgttgcttgttgtagcggtaaagttgacttcacagcggggagtgtttggataaactctcctaacggatcagtcgccgcgttgccagaaaaagagcataagaaaatgctggcagcaaagataattttcttcattgtaatacctatttgtaacaagagagggctatgataccctcgtcttattatttatgcaaccattttaaatggttttcgcatcgctcagtttgttctcgatgaattcagcaagattatagttcgaaattgatacgttcggatcgtatagtgcaacgatttcatcgaacgacaccataacagcccgtttaaagtaaacgctccagctagtcgtaaagatttcgctgtgatcaaatccacaattaggactgaacaaggcgcggtattggtatccgctgtatttggtcagacggcttgtgctgtgcgcgttactggtgatcaggaatttccctgtgtgagtctcaaccacgaagaaataacccagacgttctttattgtccagcatcgtttcaaacttacgattgttttcttcgcggtcaacacgggtttcgatcatcttccagacctgttcatattcaggccaatcatgctcgacaacaaccccttttatgggttctttgccttgctctttacgatagcgatcaattttattcactaccgcagagagaagcagtttgtcgctatcacttaacgcggcatcaatatccgcatatttaaacactgcataacgttcttcgcgtttcatactactacatccttatcacagaccggacaccggatcacacgatacacatcacgaccgccagtgtaatcggttgataccttttctttgacatcctgtgcagtgtatgacaggacagcaccacaacgacaggtagtttgttttggggtaatgcttacaacttgtaccataataacctcacaagaatagtttcacttcgctaccacatttcgggcagacgatatgttttttcacgatgtaatcagcagcacggaagaaaccattataaaacgcttcggttctcttctgtacatcagacagttcatactctaacccacttttgcagttagcgcaaacggtaattagctttggactaacaataacgctgatcatgtatacctcacgaaaaagggggccgaagcccccttaattaaaagttctcttcgacgaatgcagccagtcgcccacgatatacggtatccaggatcacatgacttgaatgaccgtactctttaagtttttcaaccgcatacacaaagccgttgttaacagcagtgttgcgcgggttgtcaatctgtttaatgttcccgcatagtatcagaagggtgttctcaccgcaacgggaaataatggatttgatttcgtgattgctcaagttttgacattcatcaacaatcagaaccgaacctttacccggatcaggatgcccgattgagcgcccacggaagtaatacaggctagggaactggacaacgtttttctccagcagcccttctacatatttgtcaacttccggttgatccttaaacagaatgttcaggctcgtaatacatggttctacagcaggacgcagtttttcgcccagagtaccaggtaagaacccgatttcgcccgacagaggactatccgatttaacatacatcaggtttgcaaagtgtccggcgttaaccaggtgcattgcaccagcaacagccagcattgttttacctgaaccagcagcgcccatgatggtcaccacatcggtatttttatccataattgcatcaatgaatgacgcttgcagtgcatcgcgaggctgaattgttttcatcagcttacgcttcatcgcggattcgtgtttgattggtaagagttcaagctgatactctccagcagccactacacgccctacgagttcaccatccgacagaatgtattggttcgggtaataatcgccgtcaggaagcgaggaatagcttatttgggctacttcgccaacatatcctaacacctcgacatcatcccagaatccagggatatcgacatagccagaatacaacacatcgctatctttcagcgagtcatcgcccgtgtattgttcaacaggacagcccttagacatcgcgatcaacagcatgttaatatcgcgggtgatcagggttgcgttttcctgcatacaggtagcgataattcgcgcatcttgtttatcaagcgggaactcttctaaaccgatataatcaacgatacggagtttcacgctttccggcagtgctgggttcgtcaggttcaacgaaacccctgtttgggtaattgcttcgtacttctgccccaggattactttagacaggaggcggatcgccaatcgtgcttcatgagcggttcgctctttacttttcaggtgatccagttcttccattgtcgcagaggtgataatgatttcagtacccgcctcaacgaatgagaagattgaatatgggttcgagattaaaacgttggtatctagaacatatttcatagaagttttcctgttaattgcggggtacgcggattcgcaccccgcgcactgcaattacatacccaaacggataatatggatatatgggaacggatgaagatgacttgaacgcatacacaaggtcagcgtttttgccagttcaaaccgttcgtcgatcgtcgtgtcacattcatcgaaaatcaggttgattgcctgatacttgatcgtttgtccacggaaaatggaagtcagatcttgacgtttcgacagaatgaaagacgaatcagcgcccttatccagtccatgttctaccgcagcacaaatacccatctgctttgtcggtgcaacgtagatattcagtgtccctttagactgcttgatgatatcgaaagccgctttggttttacccgacatccgacccatatccagcgcagtttcgaagatagacacaccgccgcattcttgcccccaacgcccatcaacgattcgcgcaaggtgcaggttacgtgactgctttacagcgtcaacatagaattgtgaaatcatattgtcgccttatgcaagttcaacgtgtggtgcgtcgataaatttcgtttcaatcggaaggttcggatcgttcttccagttgatgccgtagcgcagttttacacccagttcatcagcggcttgtttcactgcattcaggacaggcaaccacactttcgggttagtctgccagccagcagggagaacgctaggatacagatccacagcatcaccagtgatgtgttttgagttcatggtctgggaaacacccttgcggacgttctcgcgctgttgctctacggtgcgcagaccttcgcgtacaccaaaatcaacaggcgagagttccagagcacgttttaccaccttaaccagttccggcttcacgccttgcaggttgttcaggcttttctgactaaatttaaacatacatacctctttatgaaaataccctatgggctacacagggtatttacggtttaagaggcgcaacgttttacatgtaaccccaaattgcatcttccgcgcgatcgcgtttccagcgaatcgtcatttcaacactctcctgtttgtcatcaggaggaagtttatcattattgatttgttcaatatatgcttgcgcatctgcttcgctacggaacaacgcatggaaattataatggttgcgcccagttacgttacgatcatccagagagaattgacctttattttcccaatcatcatacacagtgattccgttaacaaacagccccagcccacgatgttcacgcgggaagccagtgatgatatgttttcgacccatctgtgccttttcaccagtgatactgattacttcgtacaggattgcgccaggtttgatatctttcaggacagcacgtttttcaaaagcgttcataatgtattcctcacaattagttttcatatacagattaccacaatctgttttgatgtcaacaaggtctatcgtttttatttgggaaagttaacgtgaacaggcgatcgtgtaatgcttcgatccgttcatacgcttgtttcaggatcgtcttatcttctgggttcgttgtctcgatgcagatcagttcgtccgagtcgatagcaatcacatcatccatcagtgaagcgaatacgttcacgtcagggtgagtcaattcctttatctccgcttccatcccgtcatgctgggataacagttcgatgatatcgcgctgtaaatctccctggtacgggaatccggtttgaagatggttgataattctttctgctttggtcatatttcacctacaaaaaagcccctttcggggctgggattaaatgtctttgcactggcaaacaccgtatttggtgaaaggcttgtcaccgctcaggtaagaccagaaatcacaagcctgttcagcggtttcgaagattgcagcatcatagaagccgtgttcttcgttaccgtctttattgaggaacacaggaagccagctttgcggtttgaagcagtcagtaacaactacccaaccttctttcgctttcattgcttctttgttcgcttcaaccatttccagcatttcgttcagtaagttcattttaatccccttgtttatctgtttcgttgtctacgagagagatattatcacaacggggattagtgtcaacagttattcgaaacgaattgtgctatttttgaaaaacattccagagcacacagatcctttgatctgcttgccgttcacaccagttgcttcgaatccggttgaatatgtgtctttttcggaacacgcaaaccacttgtaacccgtgaactggatgttcgtataaccctgtgcttccaggatacgctgtgcctctttctcgtcagtacagcttgactgcaagaacacaacaacgacaaccatcaaaatacacacaacaattttccacataatttatactcttttaaggttagttttgctggcttcgatccagcctgaatagttcggggagaaatcctccgccatacccaaacaaacggtagtatgtcctaatgggttcggtgtcgttactttactattgggattgatcggaagttcactagccccaacactggttgcaaacaccataccaccagttacgtaaatggtttgaatatgcccgtaagcgtcaccaggccacttgaaacggtattcagtgttccagaccttgacgttatacacgtcatattcatcgaagaggggatcgttgccctttgtcgcttcgtaaagcgcaccgcgccattcaactaaatccgcttcgatatcacttacacaaaactcttcttttgcgctcagtttatcaagcatcatttcaatagtgcggatagccatgcttaattcacgatcgagtttcataatcaatttccttaacaacggttaaatgtttttccgttcttagtctgaataattccagcgcttcttctggggttcttccatcgtattggatagtatgaataccagatttaaaagtcaacggaacccagaaaaacccaaatactcgtttctctaacttgtatgttctttcaggaacccatccaggcgtatgaacttcaactacccgaattttcatacaataccctcttcttcgagcacttcccagatcaggcgatccaggtgcatcaggttccacataacggagtcatacgaacccagcgagcgggagtaaatcactccccatgaacgataagccttttggaatgattcagcactgttttcatcgtgcggcatatcgtcacccgaagcgatcagcagtttcagaaccatcaggctattgagcgcctttggcgtgaattcctgttcgcttaacttcatcgcgtaccgttcgatgatcgcgattgacttcggatctttaatacgcccatctgtacgacgcgttttaaacgcgctcattaattcatcaactacggcggcacacttcatatgcttcatccttttcctgtgcagacatccgattatagcggatctcttcgcgctgttcaacttctctcacggcttcggctttcttttcagcggtcagtatgtgatgtactacagcgtttcggattccccagagatattcaatcatctgcatatcttcaacggtgtgataacctttcgtatcacattcaaatacaatttcatcgcgttctgccattgccacctgtgcggtagaaggacaaataaccattccagagtatttttcaatcaacgattccagtgtacgcggttttgttggaatgtcaatagataccggaaccattcgcatcgttgaatcattatgggattgataaatcatcagaatgtgatctccgcaaactgcattctacgctcaatcgcatggatagcgttatcacgctgttctttgttttcatatccagcccaggtaatcggggttgaacagatcaggtgaaaagtgattgctgggtgtctcttcccttcaacaacgattgttgcatcatcttcgatccaggttacgtgatccagattcaccggatagtttcttacggtaacagtttcaccaaccataggcgacacatccagaatatcacgatcacgaacgtatgatttaatacgagatacgattaacattatttcaactccactgcatatacatcggtttcaggggctttgtgtacgcgcatatctttaccacataccgcataagccggacagttacggcaaccgttatgatccttgttgcccgtcagttctttacggaactgttttgttttcgggtgttcccagatatccttcacaaaatcttcggcttccagaacatccagaccttcttcccagccaccttcaacccaacgttcggtaaacgagcaagggaagaactgaccacgttcattaatgtaagagctaaacatcgtcgcttcacagtcttcggcgtattgcttgtactgttcgaagttcgggtgtccctccatcgcttcaacgaaagcgggggctgaacagctatcgaatccaaatcctacaccagaatcgaggcaatattcaacaagttttttatattgttcgcgggtaacggtgtcccagttcttaccgcgtcctttttgtttcagtcccaggaacacgatcgcgtttacttgtttcaggcgcggatcattcttcacggcatcaaccacgttaaacgcgtcatcataggttttcgagctaaccatgaagtgaaggttgatttgctgttgtccggcttctgtcaggttcgctactgagtcgaaagcgacatcaaaaccagcgtgtttataaaccgataccgcaacagccccagcaaccgccgctaaacgcgctgcaacgtcttttgatacgtcagcaatggtaaggttcggcacaatgcctttagaacgcgcatacgccatcatatcgaacatatcggggtttgtttgcccctgtgcatcagcaccgagtgcgcattgagtaagccagggcattttgtcgatgatttttttgaagttggcaagatccatgttgaacccgttcgggttattggacttgtagcagaacccgcagagtttacccgctggcccgttgcatttggtagtgatctcgatatcgagaatttcggggaatggtgcgtattctggatcgtgggaatatgttgcaccccagcgagcgaattcaccagtatcaacgttgaaattatagttgtagaacttcgagcgagcgaagcgcatattgccgtgttgatagatgaacagggacggcgctttgatgctggtaacgatatcgacagttttcataatataattctcaaaatttaacatgggattggaagacagcgcgagcaaggctttcattgtcgaacggtatcgactggtgtttctctttgctgtcaatgttaacgcgccagaactcactcgaaccgtttttggtggagtaatgcatcagcgttaccgttttattcttttccaggaaagtacgtttgtcaatctctgttttgatttcgtgctgcatcattttacactccgtttcagtttacgttcgtcagccagttcttttttgtacagtttaatgtacttcccgttaagggtgcgaagctgttggaaaaccttgttgcacaaagcacgtttcgctttgtattccggcgtattgcggattgattcgatcgtcatacccatttcgtttttagggtaagcgcttaactccgcgccgatctctctgtaccagttgcttaactgatcacgctgtgctttgtactcttcaaaagttaacattataactgatctccgtaatctttcgctgcatcttcgggggttgcatccagtcggtaaagctcaacggctaacggactgggtttgatttcgcggttcaggatctcactgataccgcgaaggaattcgatataaggacggaatctcatttgatacgtaccgcgttaaaagcctggttgcgcagttcataagcctgttcaagctgttcagtagtgaacagagggctatcggtattagtggtgaaactgcaaatggttttgttgtcggcgttgacttcttcaacaacgatttcataaccccatgccccgctgtactcacatttcacgttccggtacttgatgtaaaccgctgcaacatcttcttttttgtagttccggcttttgtagatgatttccatgatatcctccttcgtttcgatgtgtgtacaataacagatcagggttatggagttttagcaattcgtgctaattatgccattttcttagcgattttccatgcggctttgaacgctggaacatcttcaacatcaacccagaaaccagaaccgaaaccatcgttgtagcaagggcaaccgtcgcagtagttttcccaggtcatcactttaccaccaacagaagcaccagtttccatcgcacgtaatgcatcttcaactttttccagtttttctgcattgtcgtcataaatgatgaagtaccatttgccgttgtattcgttacccagtttgattgcttcgcgaacaagtttcatgatgatttcctttttgtctgtttcgtttcgatgtgtgtaatataacaaaagcccctggcggttgcaaggggctttttaaacaaaaagtgctattttgtttcttcgaggattcgaaggatttcggcgcgggtgatcggatgttttgccagctcacggatcgcgtggtcaacgtgtatcttacacatcaaaaacttctccccgcacttgtcgcatgttgcatacatatcgccatgtatacgcccgatcccatcggttacggaatgatgcatccaggcgtaaggagttccccgcatccatccggtagcaacatgtttacattctcgttttcgtccgaacatattaccacccgttaggattgcggaaatgtgtttgccagtagcgcagttgttcgcggttcatgttttgggtatcaatcaccataccctgaatcatctgcaacatcatgcgggtttgattgacatcctccaggctcgctatacgctgttttaaggctttgttttcctcttctaactcaaccatacggttgtatgcgttgacgcgctccagaggcatatcagggcgctctttgaggacacgggcgcgggatacttcgcattcgtgatttgctttccagtgcgcggcttcattttctgctttttgcttatctcgcagcgccaatgacaggtcatcaaccagatccagaatagtttgcggatctacagtttcgagatattttccgagatcctcttcccagcttttaatctgtgtagggctgtcgccatatggaacaccatatgagaatgcgcgtttatactctttgcccctgaaaccatattcctgatttccctggatgcttaaattttcaacgagagtccacttactacccatcatagaagaaatcgaacgggctgatttttcaatttcttcaagtttttcacttgttactttcattttgtactccacaaatcatattgtgcgcgaaggatagcgtaaaggctaccgatattgattgaatcgaccggacactggaacaaatcagagcgcatcatattgaactcaatattgttctgttcaacgaagttaccgatcattgatgtccagcccatcaccaggttatatccgtcttcggataacccgtaagccaggttaaccctgatacaacgcttatcagccagttctacgctgatacagttacttgaatgcatagaattgcatgggaatttgctaggaaacttacggaacatctgggtaaggagtttagccgtttcaatgttgatcgcgcgttcctgatccctttgcgcctggttgtcatgaaggcgattcagatacttttccatttttgggttgagattcacatgttgcataatatattcctcacaggtttaaagcgttcttttccggttccattacatgaactgcatttcggagatcggtcgctatcatatcgccccgatccgttacatgcaacacatttccgtaatttccagccatacacgaaccgcatgtaataatcggttcgtgcggccttgcgttcgtggaagttcatactttgttgtaaacctgaaccagccacatttcgatgttcggcgcgtaagtaacgtttaccatcggcatagtgcggtatttgtaagcggctttgtacgcatcgagttcagtcggaacacagaaagagaaaccgttgtcataacgttctgcgttagaaacttcacaaccaactacagcggcaatgtttttgttcatgttcatgatgttttcctttctctgtttcgtttcgatgtgtgtaatataacaaagcccctgcatttctgcaagggcttttttcaagttattcgaaatttgttggcaactgatctacaattacctgagtttgatggatttcttcactcaatttatcgcggtaatgaaccagttcacgggttcttgatgcggaatagctaatgattttatcagcggtagcggtgtaaccgtaaccagcacatgcgatttccagttttgcgttatcgccattcggtacgcggatatgagcatacgtcagcaagtttttaaccgcttgtaacagttcatgatcttctttaccgatgataaactgatttggttctactgaatcaatgttcagttcttcgtctttgttcattttgcagccttatacatttcaaggacgcggttcatatgctcttgtgattgaggcacacccgcgaagttcagtttgatgaagaattccagacgatcctttttggtgcattcatccagccccagtgcaggtaatgacatattttcaaaggttcgctgttcgtgtcggggtagttcatgccagaataaacgggaaccgtccggcataggaagaccaatttcaccttcgtaaaatttgataatcgtcgtcaggcgttgtttaccgtcgatgacttctacccagtgagtttcattgaactggctatcaaccgcgatcgcgatgacaccacaagggaaccccgtcattaaggtagtcagaaacgcatcttgttctttctgcgtccacacgtaggggcgctgataagatggattcagatccagatcattatgcttccaccagttgagataactcccaaccatgatcgcatgatcgcgactacgaaaagttcggagttcccgaagtcggttatgaaccggaatatcatctttagacatgattcaccacccaacccaacaaaccagtattgatagccgcaacggtaaggcaaatcaccgcatacacccgcgcgttgtgaactttggttttcagttctgcgatctcctgatccttttcactttcgaactcttcgcgggttccatagtaaccaggatcagcagcggttgcgggacgaactgcatctttttcaacgatggttgcataaccactcgttacttgcgttgcgccgtaccagtcaccgcgatcggtgttgatgatcaagtgatcacccttcgcgttagctttatgcttcgacttgccaatgacaattacacgttcaccattcataatataatcactctttcacgttttgttgtaagaactctaacagctttccttcggcctgtaaagcataaagtttattcaactttgcgatgttttcaaagtctgatttttcgctgaacgaccagacaccatcatcggaaaccagcgcaccgattgatacgccagtttcaggatcacgcgtcaacgccagccccaggggatgcaggatatctttattgattttccataccagccccaattgagataaggtgttgaaatcaacgtgactcatttaggcaatgccccgaaagacagcagccccatacgatgatcgttatctgattcaccagtgctaaattcaaattcttcaccgctgatactgatagcgcggaaaccgtctttcaggtatggcaacagatacagagggatcagcatcatgtttgaatcgtcgctccacttacggaagcccagatttttcatttcttccagcgtcaaatcattcggatcgacgggttcgaaatcaggggaagcgtaaaggcgtccaggcagatcgcgaatatttttcacggtgaatgaatcaccccatgactgatacgcgataggttcagcggcgcgggttgcggtagccagaaggatcatttgacagatttgaaaagttgttgctttcatgatgtatatcccacaagtttagatagaagatgtcccatagtcttacgcgcatgatcgcggatctggctatacggaacatatttgaaaccgtccatttctgtgatggttcgcccgttcttcacgaacgttgacgcacagaagcatttatcggcttcggggtaattattgcctttatacacgaataagtaaagctcttttttactggtataatccagtcttccgaggctttccagttcgtgcggttcaacaagaactccagtttcttcgaagcactcacggatcgcagcgtgaataggttcttcgcctttttcgatatgcccctttgggatgtcccaatgaggcgtttcggttgcgtggcccattaaaacgctgccgttattcaggaagagaataccagcagaccgttccattactgtgctccgaacttacgatcgtatgctgccagcgctttatctgctgcatcaactgcctgagtgtgtttgttagcggatttctcgctgaacacttcgcggtaaatggcaacccagagggatcggcgggtctgttcgctttcttcattgacgcgagaagccgcaaaagcgttatgttctttgatcagttgtgcgaattcagcatcatgatcaatggtttgttgttgaatagctgtagaagtcataattcacctatttctttcagttcagttttgagtttttcgagagtcgattggtactgaatgccgttttctggatttggcagacgggcataatacagcgtaccagttttgttgatgtctgacaacacctcttgatcgagggtagccggatcgatgccaaaagccattttaaacatggtttccgcgtctggggcgaatccgtgagagaatgcaaaccccagctttttatcaaactgcatcagggatactttgttacccattgatatcttattccccataatgttcttcgtaatcctcgcattctgggagataggtttcgcagaacatacacagcgtgaagaatgtaggctggcgaattccgatattatcgggtaagtacatccagaacgtgttagcaaacacgatgaacgttttcaggttttcaacggttacggtactgataccgtcataaccggattgagtaattgcgcgttccaggggaacagggtattgctcgcagtagttggcgtaatgttcgcttgtcaccagcgcattagccgcttttacgagatcggtaattttcattcaatatatccccaacgaatttttacgttatcttctgacgccggacttgtaggagttgggtatggataactttgcgcttcccacagataaacaatggcgtgttttgtcaattcttcgataacttcatcgaaagtaccgacactggtttgtaaaggcaacgagaaaggtttatcgttggtttctacttgagcgattggcccatctaccaagataacacgaaccgttgtgtgctcagacatatgagcatagattttgtttttcatgcgggtacatattccactttgacaggttttgcgataaggcgttctttagtgaagccttgcccgttacagatatcacaagtaacattgaagtcttccatctgatcaacccagccagaatccggtaagccagaaggatacgtgttaacacgtttgacttcgaaccctttaccctcgcatttcgggcatttgtgtgggtactgggatttaaccatactcagcagttgccccagcgttgttgaacgatcgaagcgttcgaccagtgccattacatcagcaatacgaatcgaaccagcatcaataacggtatacaggtttttcggtacatttgagcgcatagtatatttctcacttaaaaaattttttgatgaaagagaggaacaagccaccaccgaacatgatccagtatcccgcgccgtcaccgttaaacaggacatacacagcgacaccatagcaaaagatttccgcgatattcagtaagtttctcataactccctcctttgtctacaccaggtattttaccagaaagtagattactgtcaacaacaaagttttatcaacccacttatcaccagtcattagtaatcccctacaggttgagaagatgcaacgctcaggatacggaaagagcattcattccatttgcaataagttttcgcacagtgaacagtgcctttcattacaaacccgtttgagaacaccagccagtaaagtttcatgattgcctcctttgtttcgacacccctaatataacaaaagcccctgcacgaatgcaagggcttttttcaaatatttttcaacatgtgtagttgaggcggacaatcttttgaagcaatcaggcgatccaggcgtgacataacgcgtctgtagccgtcatactcgaacttgattttgggtgcgatgtagttcacatggatcgcgtttcgcgtgttcaggctcaacgtgtactcagggataacggttcggaatcgtacagcaatcactggtttttcgtgagcaaccgaatcatccatgttttcgaacatctggacggtgaacgcacaggcaaacactttgccattgatccggcgatatgcaatgacttcctgcataccttcgtttttcgctttcaccgcgtaatacagaacgttacacgaataatgtttagcgagactattaagaatttcactgtagatcgcaaagtcttttttgactgacgcggaacgatccaggaatcggtctgcgatgtgatctgtagtcattgaaacctttgtcacataccaatcacttaacgctttactgaaattttggttaacttctctgcgtaagttattgataacatacatcaatcgtgctctgttcataaatcacccattatgtttaaagtattcgatttgacgcagacgtttttccgctgcctctttcgaatcatattcaccaagttctttcgtgcgatcatggttcagtataacccacttatcgccgcgatgttcgatgtgctccgtgatgtcttcgactttcttatccagatccagcggttcagcatcttcctggatgatagtcaaatctacgggcaatgtcaacagtcttttaactccgctgatatcttcgatgcgggaatcatacgcgagggttacatgtggtttgtaatcgtcataatcgtatgttgctccagcatccattgcatctttgaagcggctatggagataatcagactccagaacacccacgatcgtattaccgtatttcgtttcccacttctccacgtcaaccagtcgggcaggttcagagataccggatgcagggaacagatcaaccgtcttacggctatacacaatcgttgtatgcagctttgcagcggaaacaggattctctacacccagaagtttttgcaccttcgcgagcgcttcacaggaagcctgatcgaacttcgcacacatatagatccccggatcaactacgggtttcgctacttcaataaaacttttcatgtgtactccaaatgaaaaaggggctttcgcccccagtggttaaacgcctaagcgttaattatgcttttgatgcatcaatcgcttcatcgtcgccagcggtttctgctgttgctggcagaagtgctttgatcgcgccgaccagggcatcaggggatacaccctgcgaaccgtcgatttccagaagactgcaaatttggcctacgagttgacggtgatttgccagttcttgttctttaccctgaatgatttcgttcaggtcgaatacacgggctttcaggatcaggacatcgttttgaagctgttgggtttggttttgttcagtcattgtttacactcttaaaagattgaatacattaagcacgttacgtttcaaatcgtctaacgtaccattatttaggattgtataatcactcaagccaggtgtcaacccttgctccgttgaatgattatcttcaataccagtttcacgttcaaggaacacaaagcgagtcccgaacttgctcaggtatttatattcatgcggttgacgcacatcggtaatgataaagtgatccgcgtaggatttcaacattttttgaagcgcaattgaagtccagatagacggatctattttacaaacaatatcagtcccgaacacctgcatcaaacggcgaatcgtccagggctggctgttttcttcgcaaattttatgagcgataacatctgcgttactcatgaagaacccgcgagaacttaattttttgataccgctagaaaacagcgcgtatgcatcgttattggacatcaccagcggggcttcacgatcaccctcatagaatgggttcttcgctgccagcgctcgcaattgcgtgttatcgtgatgttccatagaacgtttcaggatagctttgatttcgtcggctaacgcgataacttcaacattgcggaagttatgcacaaccatttgagcaacggtatctttacccgttcgctttttaccacaaataccataaatcatttttgcgttttccgtggagtaggcacgatcacccgtccgtcgatctcaatttccatgtgagcgaagttgaacatcgtcatacaggatacggcttcatccgaatcattggtatacataagctcaagctctccgaggttggagggccaagcgccatagaagcgaaatgtcgctacagtttttgactgcgagttatccaggatatgcaaagccattgcctgttgtggttcactccaacgcacggaatcgaaggtgttaaaatcgacagtaccgagcatccaaaggtaaaccccaagatacgatcgcagttcttcatcaacagcaaaacgaatagtcagtggatcgaactccattgcagatcctgggatcttccctcgaatcattgggttcagtgggacatccgtaattggaatgttgatagcaggtagtgtaacaccctgaacctgtagtttcaacccttttacataatcattgtcaggaatatctaacatgaagttagtaggtgaaatctggttcaggatcatagcagttgtattcatgatgatctccattttatagatatttagatcaagaccgtgagcgaagcgaacacacgaacgaagtgagtgttatgtacgatgtactgtttataatatttatattttatatatagagaaaacagtacatttccgtatactttttatacaatcgttaactatccgtcttcgcttcgcttgacggaactcgcttcgctcgcgatctaatttttagttgatatattcaataaataggtatactatacctatactttcaaaagagattgaaaacatgaaatcattcaaagaactactttctgaatctgttcagaacaaaaaatttgctaagaccgttgatctggttgaccgtggtaacgctgcaaaaggtcagattggtttcctgcattttgcacatggtgctgattacgatgtgtatgcgccggactcccacgatctcgcttacttcggtaaaggtgttgtccgcctgaaaggtaaaaccactggcaagactcaggcagcgtatattgactgggcgaaaggtactgtttcattctacagcggtgatcctgctgatgacctgaaattcgacaagccactgaaattcaaaggcgcttctctgtacaaagaagcagaagaaaacctggatctgtataatcagttggcggaagatttcgaaattgatctgcctctggatgaagcattggtgaaaggaaaggtgtacaagctcccaagtaacgatatgtgcttgctgtataccggacgtaccaaaaccaaagaaacaggtgaatacgccgtgtttacggttgtagatgcctctggtaagcctcgtctggtatcgggtaaacgttttacccaggaatacaaaggtgatgttctgtctaaactggttctagctgaatcagaagatttgaacgaagccgctaaagatattcgcgaaaaagttattgcggtgttggtgaaacgtgggtttaacgaaaaagacgcagaaaagatggttgataaaaacctgaaagatgcgatgaaggttcgacctggcgcaacccctggaaaactcgcggaaatcgtgagtaccctgtaaaaataaagccccttcctttcggttggggctttttgttaatatctgttccaaactttcttcgcgctgtatggttttcctttggactggaaagcctgtgtaggcaaccaaactgctttcgcccaatcttttggggcgatctctgcaagtggtgaacgtagatgggctggcaggtaggctttgatcatttgatcagccccgcgcattcccttcacgttgttccaattgattttcagtctggttttgttagaaagtcgatctgttgatccgtagccacgtttcaggagttcttctaaaaactcttgacgtgctcgcggtggcgcatagtgcaagttcagcccgtacagaaccaagttacccgctttcgaacgtcctgaacccaggaaaatgatcagcgggaaccgatcccagtatggaagggtgtctttgtatttcgcatcgtagatgaacgtatacaagcgacccgttgctggtttcgcaaccctgtgcgtcttaatgctggttttgatgaaatcaccaaaccaatcggtcgaatctttctgacgtttcgcagcggttacaccaacagtcattttcttcaaactgttgcggaaatcgtttacgatatcaaccgcgtgttttttacgatagtcattacgtttgcgtcgggcttcggtttctgctttacggcgttcgatttcatcatcaatctgctgcttatagcggtgcatagactttgtgaacgttgcgtatgcaatcccgttttcgtccgcgaactttttggctgtcatgccttttaattttgcgcgtcggaatttgataccaagttcaacccattcacccagctttcgcttcggtggcggttttggtttgtcttcttctgcgatgatctcgaactcaaaaataaaactcataattccctccgtttagggtatttattgccctttccatccgaacacacgtttcaacgtgtcctctgtgatgattttgaactcccagcccttttgttttgctgctgcattcgcggctttccatttgtcaatgtttaccgcataagtatacagcgcatcaacaaatttctttttgttgtgaacgttgttgttcgctggcttaggtgggggcaacgtttctttcatcggtttgacttcccaaaggtaggtcacaccgttatccatttcaacatagaaatccatgaagtagcgccgtcgctttccgtctgcgttgctgaaataagggatcacaacctcttcactgttccagcgtttcacatgcgggtttttatcaagccagttcataatatatttttcccagcttgaacgatacgttatctttcgcggatctcccttatatttctgtatgttctggggcataaaagaccccttgtatgtctgtcttccagccattttagatcctaaatatagtaaacattagataggggaaattacaatgttattttcgttctttccaccagttgattacaaaggcacaccaactactgatatctaccgcgattatcgtttttactttaaccgcgtgatcaggaattataagccgcgtacatatcaactgacaggttcattaagacccgaacaattagcggaaacgctatacggaaaccagcaatactactgggttatcctgatgcttaacgataattacgatccgttttacggatggattaccgatcaggaaacggcttatcaatgcgctatccagcgttattcaaaagcaggtggtgaacaggttctttatcatatggatggtaagggcaaccgttattacaatttggttgaagaccctacgaatcccggtcattggtatgacaaaggcgataagaacatgcgttatttgcagtaccagggaacattagtccctgtagatatttatgaagatgcggtgcttcaaaatgaagcaaaacgaaccatcaagattattaacccctctgatattcaatcgtttgtaagtgattatatcaaggaaatggaaaaggcaaacctatgaaatacggtggaaataaatactcccctttctttgagggggtggtcgaagaagtcgatgatcctcgtctattggggcgtgttcaggtgcgtgtattcggtgagcatccggcacagaaacaaaaatctgaaactatcggtattccggttgaggaattgccgtggatgatgcctattcaggatattcgcagcgccgctatttctggtgttggtttttccccgactggtatcacgcgcggtagtttcgttatcggttactggcgcgataaatggcaccaggacggcgttatactgggaacctttgctggtgagtaccgagagaagccggacacccagaaaggcttctgtgacccgtttggtgagtatcctcgttatgtaggtaacgatgtcaacgtactggctcgcggtggcgcagaggggcgcggttcttcgagcgtgattattcgtgatgctaacagttcgttagctgtcaatccagatgatcgcccacttgacgagatcccagaagataaccgtcctgatactggcgggttcactatcgaaaccatgcttaaacaggatgaaggtatccgcacaaaatggtatattgatagtgaaggttatccgactatcgggatcgggcatttgcttatcatggaaaaaacccgtgatactgcgaagattaacgccgcgatcagtaaagcagttggtcgagaagtaaccaatggaacgatcacagcagaagaagtttcaacgctgtttgctcaggatttggcaaaagtccggcaggggatcagcaacacttcaaacgttcgcgaagtatacgtgacgttaaaccgtcctcgtcaaatggcaatcgaaaacatgtgcttccagatgggtgttggtggtgttgccaaatttactaatgctctggctgctatgaagcgtcaggactggcaaaccgcttacaacgaactgcgaaactcaacatgggctaaccagacaccaggacgttcttcacgcgtatctaaaatcgtgctgacgggcaaccttgaatcatacggtgttcaggttccagatccagaagggcgttcattgagtgctgcatacaatgctgttgtgttggctgcatcaaacccagaagatccttttgttcctggtgatactcgcgtaatgttcgaggaacctaaatccgcatacaatgctgaatatccatacaacatggtattcgaatcccgttctggacacattcaggaattcgacgatacaccaggctttgaacgttacaaccgtgttcacccagcaggatcatacgaagaaattcgccctgatggaacccgtgttgttaaaatcgttggtgatgattatcaaatcgtcatgcaaggccgtaaattaaacgttaagggtaatttgcaggttgttatcgagggtgatgcgttcatttacaatatgggtaacgttcaacagaccgttgatggtaacgtgaccgagttcgttcgcggtaatgtaaatcaaaccgttgaaggtgaatatgtggggctgattaaaggcaacgcagaattaaccgttgaaaaagatgcaaccgtaaacgtgaatcagaatttaatggctaacgttaaacagaatgcaaccgttgccgtaacagaagatgcaacaattaccgcaaaaaatgctctgattgatattgagcaagatttggatattggcgcacgtaatatcaacatgcgagcatcgaataatactttcattgattccggcgcactgactaagatcactggcggtactgtacaggtaggctaaacatgatcatggattatgaaaccatcattgatgggattatgcaaaactttcagcatccttgcgatgctgagatccccgctggatattacagacgcgttatctggcagggacacacagaaaattaccctgctgttggggtagaatgggcgaccgaaatcatcccgatcggaactcacctgtatacgagttcccctttcgggcagaaaagcgatccgcttccggtggtgaactctccaaacgtacccacgaacccagacggaaccccaggggtttctactgacattctggttacgaagattggttactatttcgccagtcaagcggatattgatgcctatatcgcatctatcggggctactaagctcgcgggtaatgactggtacggggcggatctatcaaaagcgaatctgttcaagaaccctggcgaactcgcgatgtacaaggtggaaaactccggtggttacttgctgacttccggcccccgttgcgatcagcgaatccgacaggtatataaccagactacaggcgcgtttaccagcattgattactactggaatggtaatcgtattgcgtacatgaaacacgacgaatcccccgcgcaccagtgcaaatatacagggatgtcagtaaacacgaacgcagataccagcattcctccggttccccctgctctcccgtcaacgtatggggcgctaccgagtgaagccagattgttttctgctctctctggattgggctgtattccggcgaccgtagggttcccgtatacgaatatcagcgatgctatgctttccgcgtggaacgagactcgtaaaacgttcaagctggctttcgatatgctgacgggtacaattaaaaatggctctggtatcgcgacgatgtttgacgggctttcgatcgggatggaagaaatcacagcgggtgctctggcattgtcacagcaagcatggcaaaccgcaatgaaggtgttccggcagatcattagctctgcgtttaacatcgtgggtggggcatggagtctgatcaataacttcctcccgactgttgcgatcctgggtgttgcaatcaacatttacgatctggtgtttggtgatagttcggttcaatccctgaaagattctttccaggctctgattgactccggcgcacagacgtatgaaagcgtcataaacgcaatctacggggctataggcagttcttacaactacaccgttgaatatgtcaaggctggcgctcgcgaccttgtagacgcttgtagcgcgttatttgactggtgtttgactatgttccaaaacggttgcgttgctctggtggatttgtacgggcgtatgatgcagatctggtcaatgcctccagaaacaccaaacccgctttggtctgcggtgctggctatccgtaacatcatgcgacagattaaacctcttgatgtgattctgggcggtaacttcccagggtttacagcaatggatctgtatcagcaagcacaagcgaaagtgaaagcgttcattgatgcatcctatgcgcagatctccgcattgtatgatcaggggcaagaactattcaacaccctgaaaacacagacacaggaaagggattcgattaaacgcaagttcgatcagtacctaaactggatgtgggaacctgtaacggaagcaacaaccgctgcttatcaggctgcacttgatgccgctaacgctgctgtgaatgcgactaaggccgcatatgagggaatcaaagcacagattgctactctgcaagatgggatgaaagacacctacagcatggcaatggctgaactcaaaaaactgcctgtaatggctcagattaaccagttcttaggttactgtggggttgcattcgatgacctgttaaaaacgtatgagaacgcgctgacgggcgcacaatcgctatataaaaactttgttgacagttcccgctcgtttaaggacacatgcaaggtgatttataaccagatttgtacgcttgctctaagtaaggtaactcaatacgtaaacaaattattgtcattaatcggactcgcgatcacattcggttcaattagtgtttgcgtccctatggttcaatactaaatacccgataacgaggggtaataatggctactacaaagaaacaaattaatcagatccccgatatctttgtcggggctacttttgacgaaatcaaatctgacttaatcaactggctccgaggtcaggacgaattcaaggattatgatttctccggctcgcgcatgaacgtacttgtggatctgttatcatactgtacactgtacattcagcaaatgagtaacaccgcactgttcgaatcgtttattcgtaccgctgcattgcgtagttctgttgttcaacaggctcaggatttgggctatatgccggactcccgcaccgctgcaaatacttcgatcctgatcactgcgaaaaacccactgaacccaacatcgatccgtattccacgcggtacgaaattcatcggtacagtgaaagaaacaaacagtttcccgttcgtcgtatccgatgacgtggtgatcgttcgtgacaaaaacaataactatgtttcgatgttgaacatcgttcaggggcgtttagtccgtaccgaagtcatctttgatggttcgactatcctgatccgtgatccaaacatcgaccgtagccaggttcgtgttaccgtcaacggcgcacaatgggatgactggacaaacgaaagtatcgtaaacgcaacgggtgcatcaactgttttctatatgcgtgaaactgttgatggacataccgaagtttactttggtgaaggtgaaaccagccaacaggtcgcgggtggtgctctgactgctgattacatcgggggcttgaaacctgcaaacggttcaaccgttgttattgaatatatttcaaccaacggcgaagaagcaaacggtgctgaaaactttgtttacgtggatacgttgacaaacattagcattacgagtattgttgagaacccgactaattcagcggactatgtaggcgctgatggtggtggtgaaccggaagatatcgaacgtattcgcgaactcgcgcctatcatgcgtgagacacagcgccgttgtgttactgcatcggattatgaatcgttcttgtctcaccgtttcggttctgttattcaggcggttcagtgctttactgataaagaaaaacctggctatgcgttcatcgcggttaaaccgaaatcagggttgcgtttgacctctgttcaaaaagaggatatgcaaaactatctggcgaagtataaccttgcgacgattacgccgtcgatccttgacccgaactatctgtacatcgtacaaagtatcaaagtaacgtatgatatcagtaagttggttgaatcagaggaatggttgcgtggtcaagtaatcaatgaggttgacagatattatactgataacgttgaaattttcaacaaatcattcagtaagtccaaaatgttaacctatgttgataacgcggacgtgtcgatcattggttcttctgcgactattcagctattgcgtgaacttgataactattacagcgctccgatgtctggtattcacttcttaaaccaggtgaaatcacgttctgttgtttcgaacgggttcaaatacacaaacgctgctggtgattcgtatgatgtgcgttatgcatcaaccgatatgaacaccacaaccggacgtgcaaaaattgttatcgggccattcaaaaacggtgatatcagtatcgcagcctatacaggaaccgattttgataaatatcctggagtgaccgatcgtaataaatattacgaagtcggctatgtggaacactacactgatttcattagtttcgatctgggtgtcctgaacgttccatccgagcgattcagcgctgcttatatcgaactgactggtacaccattggaagagaacattttcacccgtgatggttctctgattgtgtttgaaaacgatctccgtcctcaatatacaacattgacaatgaatccaatcagtcaataattttaacccctgtcatccggcaggggttttttgtttgctaaatatgggatataagtaacgcaaatttggagaaacataatgattaaagcgccgtcaattaccagtttgcgcgttgataaactggctgctaacttcgtttatttgaagtgggatagcgtcggcatggatttttactatgtcgtggaaatggcagaaactcgcggggcaggtggtgttactattccagatgaagatttaacctggttccagttgggttacgcttttttgaatgaatggttttcttccgatgtccagccaaacaatttttataaattccgcgtcatggttacgcacaagggctttgaaccgtctgattgggtttatacagatgaattatggacgttcagccttaacgcctacgcatattcaacaatgcgtgaatttacgccaagtgatgcattcataaacgaaaaattcgcaaagaacaatcagaactacgttaacttcaatacagatgtggtaatggcagcgttgatgaaagaagactttgtgttttctccactttacactgacgtatcccagatcagcgataaaattcttacacaagaaaactatcacgaaatccaggatcatattgaacacgtttgtaatgacattaacagaactttcctggtagcgtcaaacggtttgctgtacctgtttgaacgttttcagaacatggcaaaggtgtcaaacgacaaagggcagacatggcattactacaaagcatttaacgaccgcgtaggaaaccctgtatcgcgctctattgcgtaccaaagccgaaacacaacctatgtactgggttacgatcgtatcttctacgggcgcacctcaacggatattcgctggtctgcggacgatgtgcgattctctgctgatgacgttacgtttgccaaactggggaaccagactggccttgatttcgacgtagactcatacaacacattcgctaaactgcctggtaacgtgtcgaaatatgcagaagcaatggcatgttccgatgactggctttatgtggttgcgaaaaacgttgtgcgtcgtatcgcactgaaacagacaccgatcgacaccgatccgagttctccgacgttcggagaaaagattttcgatacagcaagctatacagttgtccctggaaatgataagatcgttgtcaagaaaatggatgtgatgaacgggattctttatgcactcgttacgggtgaagtgaaaaccgctctgcaagatcctacaaaacccgctaacgtggttccgtccgctgctgctggtgtgtatcaatggcaagaagacacgaaaacctttgtgcgcctgtacgggaacaccgaggaagaacgtttttatatccagcatgaatacaccaatatgtcaacgaacggcacggagatttttatttccgtagcgaactacaaatatccaggcacacttcccgatcctgaattgttgatcgagaaccctgcactggttggtgctgtaaaatatgatttgcgtcctggctatactgccagccttgcgattaactttgcgacgattcgcgctcatatcgacgacccgactgtttggaaatttggtgcgcaggaatattacaacgaggcgaattatagctggttcttccgcgactctgtgcgcacatggatcactaatgataaccgtcctctggtggtgtatccgaaaatcacctacagccttgtaaccgatagtgctggtccttcgtcatcgcttcgtgtgaacaaagaggtatgggatcgcggacatgttacgatttacattaacaacattaagtttaccggattcacaaagtatacgaacggcgtgttgctgtataagagttcaggcgaaatcatcgggttctttgaactgagttaccgcgctcgcgataacttaacgattttctggaaaccagacaatacgttattgattgccgatcttattcagcaggaacgcgaaaaaccgtatcaaccggatctgtcacctggtttgattgacccagatttaagccatatgattacgcgctttgcgcctcaaagctatctggaacagcagtatttcgagaagttcggggaatactatttgcagttcgtttcgctgggtgaaaacacctactataacaagctgctgaacctgatcaggaacaaatatccgcgtgagaagaacagcgtagaatatctgtggtcggaagtaaaccgccgtaatatctacctggataaaacgaagcgtgatcaggtggttcgtttctttgaatctcgttgtagtgatttctattcaacgaaaggcatcgaagcaagctataaattcctgttcaaactgttgtataacgaagatgtaagtgtagaaatcgaaagttcgaacactctggaatatgatattctggttcattcaacaaatatcaaccaggacattgtaggccggacgatttacacaccaacagcgagagcaaacgtgacgtatatcgaacgccagtatgatgacggtcaattacgttggtcggtaacgctgcacaacgtgatcggtaacttccttgaagggcaggttgtcaagtctgaaaagactaacttcacaggtactattctgcgtggtgtgcgtggtaagcaaatggcgaacaactcgatcgactacttcaaccgtgggcgttcttactacgtgatgaaaattcgttcgaatctgccagcgtcccgttataaggatgacgttttacgattcgtgcatccggtaggctttggctttatcgggatcaccatgctaacggtgttcatcaactccggtttgtctatgacgcatagtgaaacgatcattgacattcttcgaaattatcgcttcgatagcggttatccgaagtattggcctgatcgcgtagcacgtctggacggtaacggaaaccagacatttgaccttgtaactggtgaagcattgtacgacccgcacccgaaagcgggacaaccgtttgatgttccgccacaatatgacattgatgaaaaaccgctgaatggtgtactgccgtccgcgcgtcgatttgatcaaagtcctctgttcgatagttcagcggttaaatactctcagttccgtaacttagtggaaaaacgattgaaagacgacgcgggtaatcctcgcgatccgaatccaccgactcagagaaaggtagcataatggctcaacaaaacatctaccgtgcggtcgtaactggtaagttccgcacggaaaacatgatgaactttcgcgaaatgatcggggacacccccgatcataactcgatttatatgtcaatcgggcgtaccgaacaatgggcggataacgaatccgaccctgaattcgctcccccttatccgaacgatgatacagatggtatcgttgatatgtggacgcatatgatcgggatgacgaaagtaccaggcgaaatgattgatgcaatcgttccgcgtaaagactggggcgatactcgatatccaaacccaaaaatcttttacattaatgacatcgtggttgtaaactccgcgccttataaccgtactgactacggtaaaggatggatggtataccgcgttgtagacgttcctgatattggatcttgttcaatctccagtatcacgggtaaagttgaatgtgtgcgcattggtggcatttggacaccgacccacgaatcgatcgaacctccgcgcggggaagcgaacggtatcgacatgggcgacggctatatctgggaatatctgtatacaattccaccagatgttgttatcaaccgctgtacaaatgaacatatcgttgttccgttccctgatgaacttgaagaagatccggttcgttggggttatgataacgtgatcaaatggtatcctgatatgtacgatttggtgtaccgaatgaaggttcactcaatgcgattccgcgcgtatatggattccctgttcttcccgcaagcctctttacctggcaaccgtgggttccgtcaaatcagcgttattgtaaatccgctgttgaaaaaggcgcaaccatccgacccagaagtaaaagcaacggggcagtattacacgaaaggacagcttgaacttgactcaggacaaatgatctacatggaaaaccgtcaaccgattattcgttctcctgatcagaccgaagaagtcagtattattttcgaattctaaggaaaccataatggcatatcaaactggtaaaaaattaattgacgtggggcaaatcggcaacccgtcaactggtgacccgctgtatgacggcggtgttaaacttaacgaaatcatcaccaacgtatacaacgcgtttggtgatgtgcgtttactgactgcgaatgatggtgtgggtacaatgttactccacgcgaccggatatttccagaaattaccgcgaacttattattcaggcaacccgatcgaactgggttcattgcatgatatggatacttcaacagggccaattactgttgttcttccatcgggtaaacccggcgaagggttctatttcataaatagtaacggtagtatttctgttgatcgtcctgttgtattccgtccgcaagttggtgatggtatcaaaggggttcaggatcaactttacgtgacctctccatatactcagattaaaatctggtgtgtgaagaaagaaggttccgttactacatgggattattctgttgaatcaatgtttggttcaaaaacaatgcctgtagatactactaaactcattctgaaagcatcaccgaccgcaattcctttatttggttatagtgaattcagtggggcgaaaattctcgtgtacgcggagaatatgacaggcacagtcaataaaatggctgaaattcttttgtctgttgaccgtgtcgctaagggcgtgtattcaactgaatacgcagttctcaaaaatagcgaagatgaaatgtacacgcttacgttcactgttggtgcgagtgatattgtttacgcaaacgtacaatccaaaaccgaggatcgcattaaattctcgattaaagcggttgacaccattaaatcagggatcgcagcatgaaacaagaaattcttatcggtaacgtggttgatgacggcgcaggtgattatctgcgtcgtggtggtcaaaagactaacgccaactttaccgagttatataataaactgggtgacgggagtatcccgcacccagcgggtgcgtggaaaacgcacacagcgcctacgctgacccctattttcggtgaatcatgggcgctgaataccagcaacaaccgtattacggtaaacctccctaaaggcagtgtaagcgattataacaaggttattcgcttacgtgacgtatggggtaagtgggcggtaaacaacgtccgtatcgtccctgcaagcggtgataccatcaaaggctcaccgacttacaaagaactgtacaaagacctgatggacgttgaacttgtttattgttctcctggacgttgggaatatgttgaaaacaaacaggttgacaaaatcacaacttcggatctggcaaccgttgcgaaagaaacgtatatcgcgactcagggacaaactgacttcctgaacgtgttcggccctggtaactcgtacaacgtccgcgcactggaagtttactatcgcggtaacttgctgtacatcgacgacaagaacgggtttaattcatcaaacagcgattacggttcacctggtgcgagcgccggacaactggtagatctggatggtgtaaatatccgtcttaaaaacccgtgtaacgctggtgacacgcttcaattcgttacctatctggatggtattgccgcatggcgagcgacgtatgaagcgcataccatgcgcgtatataacacgggagacacagaacaggttagtatccctggtgaaatctgggttggtgatctaccaaacaaacgcacgttcactaatgctgaatttggtatcagtccgcgaattttgattaacccgaactcgttcgaactgctgctgaacggtcgccagcttgttaaagcaggcgatgcggatctcccgacatttgtttgtgagggcgcagaaggttatgatgaagatagctgtattgcgaactccggcgcgtgggttccttctggacaggattacagtctgatttttgttgactccgtggttactggcattaaatttgctcaacctctggaatcccgtgatgtggtaactattcgctggttcaacaatgatatcggtactgtaatggaatgggacggtgtaggcggtattaaagaacacaccgataagatttacctgaacaacgaagaagaagtgacgctggttaatcagatcgaatataccgattataacaacccaacgcagaaaacctcgcgtaaagtagcggatacatttagcggtcgtcttctggatctgcaagcgttctttgatgttattcacccaatcgggacaatctacgaaaacgcgcataatgatgctaacccaggcgattatatgggctttggtatctggacacgttacgcggaaggtatgttccttgcaggttggacaaccgatgcatcggatagcgattttggtctgaacaataacgatctggatggttccggtcaaccaactcacacttctggtggtactggtggcgaacgtggttatgaaattaaaccgatcaacgttccacaaattcagtcaaccgataaggtgttgattaaagatgacaacgggatcattattattggtggctgtcaggttgacccagatgcaacagggccaggttacactaaataccgcgaggatgtattaaaagtaaatcgggggaacactactccagataaactaaaaacgctcccgccttatattactgttcaccgctggataagggtagcataaatgactcagtttatttccaaaacaagggagggggcgaaagtcccttcccgtgaagcagactttttgcaatatgaaatgggtacgaaagaaccgctgattggtggtaaacgtactattggtggtgcaaacgtcgatcagcttcgaaaaggggtagattaccctaacgtacaatcagcaattgatgacctgtattctttgtctcaacagatcccgatcaatggggtaatcatgatgacggaagatagccccccttctgcggtgcaacaggtagaatcaattacgtttgatgggacggtttcaaacccagatccagatcaaacacaggcgactattcacgtttatggtttcccgttcgttttcgacaatacaacgaacgcctctaccgtatgtgagacagtctataacaaattcgttgaattcgtcaacgatgaaaaatatttcgatttggttactcgtaaaggtctcaacggggaaattctggaagttcgttttattgattcagttccgcatccggttactaataaaactgaatacggaatttcgatggtaggaacaatcgacgtacaggctaaatctggttacggtacatggacaaagttaggtgaaattgaccttgctgttactccagcagttccgatttattatttcaagcgtattgcatgaggataacaaatgaacaatacaattaaccacgtaagcgataaatccgtttacgtgacatttgatcctgctggtacgcaatggcctagcacgtttaagaacgtacaacaggcattagccgctattgggccgtgggcgcgtactgatgttggtttgcctaatgccgcgcctggtgtgcgcggtattgctgctattgcgacacaggcaatgattgatgcgggtactgatacccagacgatcgtaactcctgctttgctggaataccgtctgcaaaaccctcatgcatcacaaaccgtatggggttacactcgttacgcaactgatgcagaatcagtaacagtaacaaacgatctggtttctcttactccgcgctcgttgaactatgtgtttaacacccgccatgcaaaagaaaacgtttggggttctgtgaaactgtcaacaactgctcaggcaacatccggtactgatgacactaccgcaatgactccgcttaaagtgaagcaagcgatctctgctctggttccggtacaggcaaacgcaacagaaagttcgtttggtcttgttcagttagcaactgttgcagaagttcgcgcgggtactattcgcgatgggtttgcgatttcaccatacacgtttattcgtctgactgcaagcgaaagtgatttaggtttactccgtatcgctacccaggcagaagtaaacgcgggtactgataacaccaaagcgatcaccccgcaaaaactcgctgctgtgaagggttccggctctactttcggtatggttaaattaacaacagatatcaataccggattagcgaatactgctttgtctgctggtgctaacgtagtaccgagcaacaaaaacagtgcaattactggtggtgcattgtatcagggttcgattagtgctgacaataaataccagacaaagacagatgttgacgcaaatatcccgatcggatgtatgatgcttgcagcgtttaacgccgatgttggtaacttgtttatctgtaacgggcgagcaatgaaccgcaattcaaacccagaactgtttgcccgaattggttatacatacggcggttctggtgatattttcaacttgcctgatatgcgcggtcttgtagctcgcggctttgatggtgggcgtggtgtggatgcaggtcgcggttttggtacatatcaggctgatatgtttgcgtatcacgaacatgatctccagatgatttaccagaacggcggtaatcttcctaagagtcaagcagtttatgaactgaaaggcgcggaaaaaaatgaccaacgtgttatgcacctgaataacgattacagcaaagcattaggtactggcggaaatgaaacgcgaatgaaaaaccttgcggtcaactacgtaattcgagtacgataaaggggttaatccatgatttcaaaacttaacccgttaccaaagatcccgtttgttgatggtgtccctgcggacaccacacaaacccagatcaattggattgttaacggcgaaactctcgatggtgcaaaaaccaaaaccactaacgagggttctttaaacagatgcggtgttctggttcaaaagaacgcggtacaattagaagcaaatacaactacccagacatcaaaaatcaacgaagttatcgatcaggttaacctcattactgaaaacctcgcggcgatctctgatgatagtgtgatcgacaaactggataaagttgtcgctgatgttgacgtgctgaaagtagatatgtctgctgtacaggcaactacagcaagcaacaccctgaaaattcaggatatcgaaaaggaaattggtgtatgggatgcgtcaaccgatcctaaacatcgtaccattcgaaaagatattattttcctgaaagatgaactgggtgcatatcctggctttaacgaagatggtgatgttgatccgtcctctactggctccggcgtgaaatacaaggtaatggctaacgctcaggcggtatctatccatgaagcacgtattactaagctggaagatgactgggtaaactcagatgtaggtaatttaaccgatgaagttaccgatctgcgtaacgaaatggggccgaagcatttagccactttcgaatctgtgtatgttcgtctgaatggtatcggtggcgatatcactggtattaataccgaactgtcaaacatcaacacttatatcgggcgtacaggctcaggtggttctggtagtattgattcccgcatggaaactgcggaaacgaacattactactctgcaaacccagatgaatgatccggttgttggtgttctgcctcgcgtaatccttctggaaagcgctgttggtaactcacaggttccaggtagtatccgttacgatatcagcacaatgaaacgtagcattagcgatctgaatatgatcgttggtgaaacaagtgatgatggtctgcgcggtgaaatggcgcaggttatgaccgatatcggtactgactcccagccaacaagcatcaaaggccgtctgctgaatgtggaaaacacacagcgcgacgatcaccaggcactggttgatgttaccgcaattgtgggtaatacgtcaactggactcgttgcggctaatatcgcgatgggtaaagctgtttatggtgatgcaaccagttctgatccattcctcaaagatggtattcagaaaacggctcgcgataacaaaactgcgatcggcgttaatactacaggatcagaaacagggatttataaactgatttccgatctgactgcgcgtgttgctgctctcgaagctggcggtggtggtaacgttgaacaacgtctggacgatctggaacagaataaagcctctcgccaggatgttgctgatgctctggttccgtatatcacagaagttgaagcggataacaaatacgaagcgaagaaagttccactgtcatttactcaaaatctggtcggtcgtaacgattatatcgagggtgatgatatttctttatctgttaccgttacaggtggtaaactgccttatgtgtaccagtggaagaaaggaaccgcaaatatcgggactgattcaccgagtgtaatgatccagaacatcacaacgagtgattccggcgtatataaagttgtcgtaaccgacgctgaaaataccgtgattacttctgatgaacttgacattgcggtacatacggttcctcagttcgatacaaacttgagcgatatttctgttgttgatggtgatccattgactctggaagtagtgtttagcggtggtaaaactccgtacacttacgtatggcataaagacggatctgtattgagtggtgaaactggttcttctatcgtcaagtctgctgcaaccagcgcagatgcgggtgattactatgtaaccgtaactgacgcgatgaacagtaccaacgattcagcaaccgcgactgtgactgtaactactcgtccggctctggcgtttacaacggatcttccggcaacgaagagttatacaacaggcgataatatggatttagccgttgttgttactggtggcaaaacaccatatacatacaaatggtttaaagatacggttgaagttactggggaaactggcgcaagcctggctacagtagcagaagcgggtgtgtacaaagttgaagttacggattccgcgacttctccggcgaccatcacctccgctgaatgtactgtgacggtagcataattttaacaaggggcgcaagccccttttgaggatcatatgattacgaataatccagaacagttaaaggatgaaattcttcgtcgtctgggcgcaccaatcatcaaaatcgaaatcacacaagatcagatttatgactgcattcaacgcgctttagacctgtatgcagaatatcattataacggcacaaacaaaacgtatctgattttgacactgggtgatgataacccgcgcaacgtgttcgacttgagcaaagaacacatcttcgcgatcacgaaggtgttgcgtacaaacatgggttcattgaccacaatggacggtacagcggtttatccgtggtttaccgatttcctgatggggttgactggtggctctctgggtgggcgctgtgcatcgagtgtgtacggtatgaacgcatacggcgcggatatgggctactttacccagatgatgtcctatcaacgctcaatgcaagacctgctggctccactgcctgattactggttcaacgatgatactggtcagttctgcgcatgggggcaggtgaacaaaggcgacattatcgttattgaagcgatggttcgttccttcgttgatgtccctagctccgtaggaagcgtcgcaggatacgctacagcgggttctaacgcagtggaagaccaatccatagccgacatctacgaaaacccgtataacagcgttgtaggcggtgtacgagcgggacagggttcaactgttacgggcggaacgtctgcatataacaaccgctgggtaaaagactactctaccgcactggtgaaagagatcaacggacaaattctggctaaattccaggggatgcaattgcctggcggtgttgctcctgatggtacgcgactgatccaggaagcggaaaccaaactgcaaagtctgcgcgatgaactgatttctatgtctgacgcagtaccgatcattatggtgtagggggaataatgcaaaactgggatgaaagtttattcgctcagttgtctacgggggaaggggttgatcgcaacttaaaggatcaggtcactaacccgtatgtaaactggtacaaatacaacccgacacaacagctacacgattcactgacagcagaatcaatccagatgaaatcgcctgatatgtattacgtccggcgtgacttcgtgaatattgataagatcctgggcgaagaccgagaatccaaatttacgaagtcatggaaaattgctgcatatattgaatcatatgccaattatgaaggacaacgagatttctttagtaaatttggtctgagttcaaacgatgaaatgacgctggtaattaaccctcgtttgttcgcacatcaaactgatggtggtattcctgttctgggggatctggtttatttccctatggacaatagcctgtttgaaattacgtgggtagaagccgatccgttctatcagttcggtgatcgtcctcaacgcaaaatcaacctggcgaaattcatctacacaggtgaagaactggctcctgaattgcagcgaaatgaaggaatccacatcgaacctgatgcagaactggatctcgaacctatccgaaatcttgacgggctggctgatatcaacattgaacagtacgaagaagacaaagaatttgaaagagaaggtgatgaattcatcgaatcttttgatgttgtcaacggacgcggttcaccgtttgcaagtctgccataaatacgttatatgggtataggcggaagtctatacccaacaacccatacaggaaaataaaatgtttggttattggtataatagttcgctgcgtaattatatcgtcctgatgggggcgctttttaatcacgttcaggttaaaagagtacgcggcgatcaagaaaaatacataaaggttccgatcacctatgcatcgaaagagaagtttctcgcttccatgaacaaacttaactacacgttgagtcaggaaaacgttgctaaaacggaaacgattttaccgcgcatgaacttatcactggtggatctgcaatataacgcaatccgtaaaaccagtatcgcggtcaaccaaaaaatgacacagttagcaaccccacgaaaaacgatcacacagtttaaccctgtgccatatcgtctgattttcgaactgggtgtgtatacgcgatatgaagatgatatgttccagatcgcagaacagattttgccgtattttcaaccgcatttcaactgcaagattaccgaactgcataagaacgaaatcacagttgaccgagacatcaaaatcagtctccagtcggttgcgccggataccacattcgagggcgaagcatcacaacgccgtcatgttgagtggtcattcatgtttgaattacagggttatctgtacccgcctgtaactgatgttaaaggcgaaatcagaaccgtttacacggatttcttctctaacatgaacccgttagataaagataacttcgaatccgtggatagtcaagccgatccggtagatttgcctatgcaggactacacgggcgaagaatatattcagacgtactcgcacgataagccgatcccgtctggtgatgaacctcctaagccgagggaatgagaatggatgaaaaattagatttgcagcaattgctgaatattgattccctccctggcggcgttgagtctggggaggatgtggttgtttacgaaaaacttgaactggttgacgttcaatcacatccagcagaccggaaaccggatctggaagaggattatacgctcgcgcgtaagactgcgcaccatatgaatcagatgatcatggatatggcgcagatcgcattacacaacgcgaagaactccgaatcgcctcgccacgtcgaggtattcacaagcctgatgaatcagttaaacgtttcaaacattggcctgatgaagattcacaaagaaatgcgtgagattacggaagagactacaaaaccaggtgctgaaaagggcagtggtggtagtgaaatgaatatcgagaatgcaaccgtatttgttggttcccctacggaactgatgcagaaatacggcagtgcatatgaacccaaagagggcttcattaatggtgaagctgtagaggtaaaccctgatggaaatggaaccgacgatcgatccgagtaaggaatcagatcaccctatcggattaatgcatcccaaatatctgaaaaagaaaattgatgaattggggatggagtggacacaaagcgaacacgataaaaaatggtatccgacaacgttcagtgactacctgaaaattaacggcattcaaaaggtcgatattcagtctaaggacagttcgaactttgccacgtacaaaaataaaggcaacaagaaaacccgatataacggcaacccaaacctgaaacgtgcgtatatccagactaaatggacgcaacaaatgttgatggagtgggtgaaatgtcgtgatgatatcgtttattttgctgaaacatattgtgcgatcacccacattgactatggtacaatcaaggttcagttgcgtgactatcagcgcgaaatgctgatcgaaatgcacaaaaaccgtatggttgcctgtaacctgtcgcgtcagttgggtaaaacaaccgttgttgcaatcttcctggctcacttcgtgtgtttcaacgaagataaatatgttggtgtgctggctcacaaagcctcgatgtctgcggaagttctggatcgtaccaaacaggcgatcgaactactacccgacttcttgcagcctggtattgttgaatggaacaaaggttctattgaacttgacaacaaatgtaaaattggtgcgtttgcatcttctcccgatgcagtgcgtggtaactccttcgcgatgatctacatcgacgaatgcgcgtttatcccgaactttgttgatgcgtggttagcgattcaaccagtaatctcttctggtcgtaaatcgaaaatccttatcacaacgacacctaacgggcttaaccacttctatgatatctggaacgctgctatagaaggaaaatccggtttcgtgccttacacggcgatctggacatcggttaaagagcgattgtatacagacggcgacaacggtacatttgatgacggttattcgtggtctgcgaagatgatcgctggctccagcaaagaggcatttttgcaggaacactgcgcggaattcatgggaaccagtggaaccctgatcgctggctggaagttgtcaaaactcacatggattgatattgatgaaacggaaacgaacttctatcagtataaacgtccagtagaggggcataaatatgttgcggtacttgatccagcggaaggtcgcggacaggattaccatgcaatgcatatcatcgacattacgacgatgccatttgaacaggttgcggtgtatcactcaaacaaaacgtcgcatcttattttgccggatatcctgttacgttatctgaatatgtataacgaggcatggatttacattgagctaaatagcacagggcattcagttgccaaatctctgttttccgaactggaatatgagaatgttatttgtgacagctacaacgatctgggtatgaaacagactaagcgatcaaaagctatgggatgttcgacgctgaaagacctgatcgagaaagataaattgatcataaataacaaaaagacaatactcgaatttcgtactttctcagaaaaaggcgtttcgtgggctgcggaagaaggatatcacgatgacctcgttatgtcgcttgcttgtttcggttggcttacaactcaaatgaaatttgccgaattctgcgagaaagacgatttaagactagccaatgaagtttttgcacgggaacgcgaacagctatacgaagacgcattatgtccggttatcgttacaagcggtgatgaaacgatttcggttggttctcacggtatttcgtttatataaattagaggaaattctataatggctttacaatctccaggtattgaaaccaaagaaacatcggtacaatctaccgttgttcgaaattcaactggtcgcgctgccattgtcggtaaattttcatgggggccagcttatcagatccgtcagatttctaacgaagtcgaaatggtaaactattttggttccccagacaacttgaccgctgactatttcatgagtgctgttaacttcttgcagtacggtaatgatctccgtgtggttcgcgttgtcgataaagatgccgctaaaaacgcaagcgcaattttcaaccagatcaaaacaactatcgcatcacagggttctaactacactgtaaacgatgtaattaaagtaaaatacaacagcgttgttgtagaagaaaacggtaaagtgtccgaagttgacagtaacggcaagatcctcgcggtaatcatcccaagcgaaaaaatcgttgcccgtgctaaacagattggcacttacccagatatttctactggctggactaccgaaattgtttctcagtcttccggtgtttctgcgtctattacgattgacggcatcgaaagcgattcagggatcactctgttgaacctggatattgcaaaagaaacaattcagggaaccgcattccagactcttacccagaaatatcagatcccgtctgtcgtggctctgtatcctggtgaactgggttcaactgttcaggtggagattatctccaaagctgcttacgattctggcgctatgatttcaggctacccttctggggtttccgttaagaatagcggtcgttctgtaatgacctacgggccacagaccgacaaccagtacgcttttgttgtgcgtcgtggtggcattgtacaggaatccttcatcgtgtcaactgagaagaccgataaagatatctacggcgtaaacatcttcatggatgactttttcgctaacggtggctctcagtacgtttacggtacttccctgaactggcctaaaggcttctccggtatccttgagttcggcggtggtttgtcctcaaacgacactgtaggcgctgatgaactgatgactggttgggatatgttcgctgatcgtgaagcgctgcatgtacctctgctgattgctggtgcgtgtgctggtgaaactgtagagatcatgtctaccgtccagaaacacgttatctctatcggtgatgaacgtcaggattgtactgtgtttgtgtcgcctccgcgctctctgatggtgaatattccactggcaacagcggttgataacatcattgaatggcgtactggatataaactcagtggtggtactccggttgacaataacctgaacgtaagttcaagttatggcttcctggatggtaactataaatatcagtatgataaatacaatgacgtgaaccgttgggttccgctggcaggtgatatcgctggcctgtgtgtttacactgatagcgttgctcaaccgtggatgtctccagcaggttacaaccgtggtcagatccgcaactgtatcaaactggctatcgaaccgcgcacagcacatcgtgacgcaatgtatcaggttcagattaacccggtaactggtttcgcgggtggttccggcttcgttctgttcggtgataaaacactgactaacgtaccgagtccatttgaccgtatcaacgttcgtcgcttgttcaacatgatcaagaaagacatcggtgataacgcgaaatacaaactgtttgaaaacaacgacgatttcacccgttcttcgttccgtatggatacaggtcagtacatgactaatattcgtgcgctgggtggttgctacgattaccgtgtaatctgcgacaccacgaacaacacgccggacgtaatcgaccgtaacgagtttgtagcaacgatctacgtgaaaccgcctcgttctatcaactacatcactctgaacttcgtagcaacgtctacgggcgcagatttcgatgaactggtagggccacaagccgtataacgtcaagggggctgaaaagcccccataaataatccgaggttaaaaatgcttactgacattttacgcgcctttgaatccggtgatttcgcacgtccgaacctgttcgaagtagagatcccgtatctgggcaaaaactttaaattcaagtgtaaagcggcaaccatgccagcggctacagttgaaaaagttccggtaggataccaaaaccgcaaaatcaacgttgctggtgaccgtacctatgatgactggacaatcacgatctataacgatgacgcgcataatacgcgtgacgctctggtagcatggtcaaacatgatgcacggaatgggcgatcagattagtggtgatattccagcgaactacaaaaaaaccgctacggtgaaacagaaaaaccgtaacgatgaaattaccgccgaacataccattcacggtcttttccctactaacgtaggcgaagttaccctggactgggacagcaacaacgaagtgtcaacctttgaggttactttcgcgctggactggtgggaataaaggctataaatacaggggtagcaatacccctatcattatttttcggagttactatgaactttttgggctttggcaatgtacttagctttttcaagaatttcgcccgtgaggacgaattagatcttgaacagcaattaaaaaatgatacaggttcggtcgcgcctcctaaaaataatgatggtgcttatgaaatcgaaactgatctgactaatcagaaatacgcaagcgtattccagcagttttattctggacaagatccggcgattcagaacaaagaacaattaatcaatacatatcgcggtatcatgtcttacccagaagtagaaaacgctgtttctgaaattattgacgatgctatcgtgaatgaacagggcaaagatatcattactttggatcttgccaaaacagattttagtaaggcgatccaggacaaaatcgtagaagaatttgataacgttctaaatatctatgattttgataacatgggtgcgcgtctgttccgtgattggtatgtggattcccgtatctacttccataaaatcatgcataaagacgaaagcaaaggtatccgcgaactgcgtcaactcgatccgcgttcgatggaactgatccgcgaatctatcactgaaaccctcgatggtggcgtgaaagtattccgtggttatcgcgaatttttcgtgtatagcgctcctaaaaatggctatacatacaacggacagatctaccagcataaccagaaggttaaaatcccgcgctccgctatcgtgtatgcgcattctggtctggaagattgcagtaacaacattatcggatatctgcaccgcgcagtcaagccagcaaaccaattgcgtttactggaagatgcgatggtcatctaccgtatcacccgcgcacctgaacgccgtgtgttctacatcgatgtaggtcagatgggtggcaacaaagcgacacagtacgtaaataacatcgcacaggggcttaaaaaccgcgttgtgtacgatgctaaaacgggtactgttaagaaccagcaaaacaacctgtcaatgacagaagattactggttaatgcgtcgtgacggtaaagctatcaccgaagtagacacgcttccaggcggtgcgaacttctctgatatggatgatatcaaatggtttaaccgtaagctctatgaagcactgcgtgtgccattaagccgtatgcctcgcgatgatgggggtatgcaaattggtgggggtggtgaaatcacccgtgatgaactgaaattcagtaagtttatccgcacactgcaaattcagttcagccctgtgctttccgatccgttaaaaactaacctgatcgcgaaaaaaatcatcacagaggaagaatgggaagaaaacgttagtaaaatttccttcattttccagcaggattcatattacgcggaagtgaaagatattgagattatggaacgtcgcctaacgttgatgtcacaggttgaaggtgtagttgggaaatatgtctcccataaatacatcatgaaagagattcttcgaatgtctgatgaagacattgacgaacaagcgaagctgatcgaagaagaatccaaagaagaacggttcaaaaatcccgaagaggaagaggaaaacttttgatgaaagaatttatcgaagcaatcaaaagcggtgatctggtggaagcgaagaagcaattctattccatcatggaagaccgtaccgaagcccttcgccaagaaatgcgcgttgaactcgcggaagctgtacgcatcgaaggtgaaaccgacgatgacgacagcgatgacgatgacgacgacaaaggcggcgatgataaaggcgacgacaaagacaaaaagccgtctgataaaaaagacgacgataaagacgaataagaggtgtaaataatgcaactcgaactcgaagaaatcagcgtcgaagatctcgaaccccatttaaccgaagcgaaagcccgtgttgatgttctggggatcgatgacggcactgtgaagatcatcgaaaatttggcggtcaatgaacctcatttagccctggctatgatgtccattgtcgagggtttgagtttagatgaagtcattgttaaacacgtagattcgcgcggtaatgtggaacgtaaaaaagaccgtaaaacccgtgaacgtaatgcgtatcaaacaactggtttaactaaatctcaacgtcgccaaattgcgcgtcgtgcgctaaaaacaaaacgtgcaaacccttctattacaacccgcgcacagcgtaagcgtaaaaaagcgctccgtaaacgcgccgcattagggctataaatatgaatgaatcccaactcaatgaaaacggcgatatgctgctaatcgaggaatggggtttaccttgtgcggatatttccgattcaattttagaatcggtcggtgagtcaaaaaaagacggtaaacttcggattgaaggtattttcctccaggccgaaaaagttaaccgcaataagcgactgtatccgaaaaaagtattagaagaagcagtaaacgattatatcagaactcaggttaat

SEQ ID NO: 31 - DNA, 179658 bp, Unknown
  source: /note="Description of Unknown: KP2W-M0103 Bacteriophage sequence"
ccttcccccgatgcatcaaaataaccgcctgtttggttgatggttcctgttaccgtgcctcctgtatttttcaagaacagtgcatcgatccatcctgaaaacccgcttttgttgatatacacgttcccgtcattagccagaataccaccgccgggtgttttaagtggttgagatatgtttgccagtgttagaacaccagtcatcgcatcaccggatttattgactgcccctacttccgccggagtcggaggaagcgaagtatcataaattcttctccatccattagcatcacccgcactataagaccatgcaccaggagaacccgtcgcagcacgaatccatgttgatgttatatcatagtaagtctgaaccagagaaacaccactattcagagtacggcgatatgtggcaacctgaccgtaatatgttgtgtttccatatggaccgtccgttacgttaccaccgaccgacagaacatcgttcttttcagtaaccgcagcagccccgaaactgtttccagacataccgcgaggaatacccgtgatataacgttcatcatggttagcccagtttgacggagttactgtattcgcagtaatcgcgccactaactgccattgatgtagcattcgttaagccgaggttagaagtcccgattacacggaaagatccttgctcaactgttacctgttgggtttgtgaatccagactcaacagcgtattttgagtaccatttttaaaggcacggatgtatattttattacctccgtctgtgcgagcgttcacgttaattgcacccgctaactgtccgccagaaataccgttgtatgcgttaatgtccatcaacccagattccgcaccaggaaccgaagtaatatcagggcgacggaaaacaaccaccggagcagcagcacttcgagtgatcccgaccgaccggttagattgaatagtgtttgcggtcaacagaacgcctactgtcacgttttgactaaacgtagtattcttcgcaacagtaccgccgttaatcgtcgatagtgcgtttatatcctccgctgttggacgatcgttttcggtgtatactctccagcctttatacgttaattgtccaccagagggcaatagaggaaggttagaagcactccagatacccgcaccacccagcgttgtacctaatttcaaatcagccataaaaatttctcctgtaatgactgtatttatgaaaaaggggctttcgcccctttaacgcacaattgacagattaacgtctttagcggacatcgaacctgtgcttgtgttgtttggataacgatataaaccgaaatcaaacataacagcaccagcaggaataaccccttcgtttttgtagaatgaatatacgttcgggatcgtgccaacatcacgcatgttaattccagagatatacgtattgtttgcatcccagaactgcattacgatgtacgcgcccttactatttgcgattgctgttgcatcacgtttcatttggcattgcatacggatcgtatcaccaggttttattccataactgcttagtgatgctttcgttaccgccgcttgctgggtagcagtccattctttgaactggtactccgctgtattggtagaagtatattcagtcggatcagaaacaatataatcaagttcagcaaagttatgcgaactaattttcttgtcactgataaccccaacaggcgaaacaggcagagaaagcaattgttcaatcgggtttacggttccagcatcagtgacttcggaaagtgtttgcatcctaataccgttgacaccgatagccgccccgtttctgttcacctcttcgcgagggactttacagaattggatatttcggcatcgggcctgacctgtggtaactgttgacggataatgataagcagaaacacccaaacgagttatatcagcattatctggaatagtgtaatatcccgataccgaatgccatgtatccgcagcaagtccagttgttctaagaactgttgatgatatccactgtccagacgcaatatgagtaaaggcatacagataacattctgcccccgcattacgtgcagcctgatcgatatagatgtccgcagtgattttgaaaatatcattacgagaaacatcactcccaacgttccaaaccccgtatgctttgaatggataaccattaccgctatacgtttgaggatcatccagcattctttcaggaataccagttaccccgatatcactaaattcatcaaacacaacttcaacaaaactcgttgtattgtctttcaaccccgtaccagaaccaccgacaaagttttccatgcaaatctttttcatcgttgatgaatagatagctgaataggatgaacggtgagaatagttggttgtggtgatcgggatattaaagaaccgagtttcgggccacgcaacagaaccaattttcctcattgtcgctaaaaagttatcatcacttctgatcgcatcgaaagtataaaaacacacaattctgttcgctggaagtgaattcaggtagtctttaatcgcattcccgttcgtagcaggatcaccatacatatcaaatgatttgtaatccaataatgctaaagttgttccatcaatgactgccaggttaattccgcgagcaacttgtgtccgcctgttaataatatcagccccgttaatagatacctcaaccgagttgaccgcagaatcgttattcgttccacggacaacaaggcgatatttcacggcgtttgcttctgaaaacacattcgccgtgaaactatcagggccgaataacgccataaattcgttattcgccatttaaattattcctcccacacaaattcacaagtcttagttgctgggtttgcgaagattttcacgttaccgattttgatatagttacgtacaaccagagtatcgacggttgaacccgctaccgctaccgccccgatttctgccggagtcggtttacgacccgcatgatagatcaggtttccgttgatcatcgctttgttgtaatcggtgatattgatgttgaactcagtcaataccttatcgtcaatgccagttaagcgcattttctggacgttcccagagaaatcacctgcctgaacatgtgccgtaccgctcacactggtaaagcgtccacccgtaccgtttacgctaactgacagcgcaccagtcatagtatcacccgctacgttgacataggtactgtcaagatgctgggtaaagtttcgggtgttgatcacggttgcagtggttgtgccgccgtcattactgattgttacaccgttccaaccattagttgcagcggttcgtaattgtaccgtaggcgttgctgtactcgcaacaaacaaatcacccgccgtgttgatgttagccagagctttaccattcagacgaatgttcgtaccggaatacgccattgtgccgttaccgacatcacctactgtcagaacgtcaaccagatccgttgtgcccgtcgccaggcgatacgtgcttgcctgaacagtttcatgccagattgtatccgtcacaccaccacggaatgtacgaagcaggtttttggttcccgcagcctcaccactcagaacagtattagcatacaccgtgtttgctttcgcagactggttaatgttattgttcgtggttacggtgttgttaaccgttaccgcagcgttagccgtcagtgttccgttagtggttacgttaccaacgaagttgctcgtaccgttaaacgtgttgtttccagttaccgtctggtttgcatcacgacgcatccagcttgcagcaaccacaccgcccagactcaaactattctgcgccgttgccattttcggtaagaagttttgcagagcaaagttcagaccgcgaggcgatacagcatagaaatcttcgagataatcgtcaacggcctgagtagaaccaaccagattatcaccgatgaaagtgtttgctttggtagtgataaacaccgcaccacgtcgagttgttgttgcaccccacgccggatcagtaccgttcaaaaactgcatggtagccggagtaattgccaggttagtagcagtacccgcacccgcttccgcgttagtcgcacaacgaataataccttcggcggtatccgtcgctttcttcgcttgcagttttttaggcgtaatgaacacggtatccagaagacctgcatcagtttcgccctgagtcgcaacgcgtaaagtaccacgctgtgtttcagtcgcagacgcaatccccaggttaaccgttgtccagatagtgccggactgagttaaaccatcagcagttgcaaccgcaacatgactcgtaacgtcgaagaactctttcagcttaaccggaacaactgccttattcgttaccgtacctgctgaaacttccgcagtggtagcgagggcaataataccatcaagcgattcagtagccttgcgatcgttcagtttcttaggcgttacagcacggagatcatcagttcccgtgtttgtttctgtctgggttgcgatctcaatcaatccgatacgcgattcagtagacgttttacgatgcagcatttcaggagttactacgatcggcattgaagcagatccagcagcagcaccagttaccacttcgttttcagtcgccagaacaaccagaccttttgacttttcggtcgccgtcttctcgttcaatgatttcggggtgacaaggtcaacaccgttattgaagttgtagacgttcgtaccagcatccccacgtaaagccccctccgctgtcgtagcgcccgttgtaacgagttttccgatacctgctaaggtttcgctcgcacgacgcgtatcgagctttttaggcgtgattgcggtagtgtcatcagtacccgcgtttgtttctgcctgagttgcgatttccagcaccccacgacgatcttctgttgctgatcgttcgttcagctttttaggcgtcacgatcacgtcatcaaggaaggttgctgtcgtgttctggttaacttccgcagttgttgccaggcgagcgataccacgacgcgtttcagtagcggttttattcgccagtgtacgcggggttactgccagttcatcagacggcgtatcttcatggttcttgtttacttctgcctgtgtagccagcgcaatcacacccagacgagaacggtttgttggatcgacacgttcaatgatcgggcgatactgtgcaactacccattctttcgtagctttcagatacgacaattccatgtatggaagatagtcagtatcggcattgaaagtcagagtgtcaacactgaaccaatcattaggcggataatccttacgctgtgggaactgcatcatgtttttgttggtgcggatcttttcaccggaaccatctttaactttgatcgtgcagttctgcgttttccccatcatgtacatactgatatatacgcgatcaccttctgcaacatcttgcggaagagtcagcgttacattacgtacagttggtgggttgccagcaatcggagtgatgaacacgtaatcgttaggcaacatgttcaggtcatcactgatacgacgcagacgaacgcgctgatcaccgtcataaacaacccaacggttattagcctgatcgaacatgaagataccataaccggaacgctgtgaagtcacagaggttacgttattgataccgtcatagctgatcgtgtgtccgctaccaggataaacttgcagagtcgcaacgttcaccgaagcaaggcgatccagatcgtaagttgtgattgagtcaccatcgtttgcgtaacgaggcaactgcaacgtaattttacccgtcccactgttacggaatgttaccatacccgcttgcatttggaaagcggttaaaccagtcgcattaacaaactgcgaatcacggttatcacgcatttcagcaacacgccataagttgccgttaaaaataaacgcaacggtcatatatgggtgagtcagtcgataagagcttgactgaatatcacgtaaacggatctgacgggtgtttgaacgcactaacaggttgttaacccctgcaagaccaccaccatctttaatagtgataatatcaccctcaacaggggcatctggcagaatataggtcagttcagagaaacgaccgtcagccattaagtacgtaccggattcaacagggagaccgtcattgctcgttacgttgttatatacccattttggatcgttacgggttgagatccattttgtttcatcgaaagcacccgctggtgatggaatatctgcgcgagcgtaccaaatacgacgcgcgtacatgatagccataaacgcagcataaccacgggtagaatcgtattgttggatcgtgttaaattcgttaaaaaagtcaacgttcacgccgtcgctcaacacagagcgtgatgctttaccaacgttgataactttttcgccagcagcatcaaggccacttgtggcgcggaatgatttagctaccattatcgttttcctttatcttattcaatactgatatttataaacaaaaaaggcgaccatcaagtcgcctttttctcacggtaattgttcagccaatctttaacaatcgcgtgatgaagaggattcgcataatctaatttgtttcttttcttgtatggcgtaaaagcgtttttctctttgtccgtcatttggaaaagggtttgaaatgatttgcgttgccttttcgtttgaactgcttctgtggtttcgataatggcatcaggaaaatatttttccttcatgtatttcgctaaccgcatatcaggcacaaataaattaatctttcttttgctgttgttgtgtcggatatcagaacgagcgcataactgaaaggctggttcgtaatatttactgacaacataagcatcaactaattcttcctcttcaagtccagaggacaccgcaaccgctcggagcatttgacgcagccagggtaacgggttgtaactgaataatgctaccacgttagtatagctcgaatagaagttcaacccgtgcgagttgtacgggatttcctgcccctcgctaaacttcgatctgtatgtgttggtgcaatagatgaactgttcgccccctaaaagcgcctccacgcgttttttaatctgggtgtatactgtcgtcccagattgagagagatcgcccgtataacgcgaataatccccctctgcgagcacatgtattttaatgcgcttcgtgtttttatattgcttaaagtcaaccagcgtttgaagcggtgaatctttgaactcaacatcatgaaacgtttgtaggatcttccctgtaatcgtatctttgatgttggatgaagcaatagttacatttttgaacttccactggcttacgtcatgatcctctacgaagtaacagacatatcccgaatcgctacattgcatcttcaccggaatagcccctaacagagcacggtaaagcgggaacatcttcattgcgatatcatcacgtttacgaagcccatcataggctaatcgtgtaaccagttctcgtttttcttcgtcaagttttaaatcaacgatatcatcggcattgcaactaaacggcaagcaaatctcgcgtatgtgcttgatattgctattaaatcgcagactttcgaacgcaaccaaatcaggaacttcgtcaatgtatagagaaaaatccttatacaaatcaaagtcatcaatgtttttgagtgctgcatgagtgataaagatcacatcataatctttgacaacctcacgcagcgcatcgttattggttcttttggttcggtgatccgtgtccacaatcaccgctcgtttcccttttacctggttgatgtagtagtcataagactgttttgataacatcatggaaatcgaagcgatgattgctttttcgcccgtttgattgatatggttcagaatcgcctttgttttaccgcttgacggaacacattcaatcgtattaaagatcatttattcttagcgtatttcttctggtatttctttattgcttcgtcggtgatctgtttaggcatttgacgtgctttcttcggtttcagtggttcgacaccgaagatttcaacgccgtaatgtttcagcatcattgcaacgatttcctgacgaatgaagttgcggctaaccttttcagggaattgatctttaatctgcttatgaagacgatcttcgagcgcgtccaggtgagtaggagtgatgatcgcggtgttatcgcgttcaacgaatttctccatgtattccattgtttcagcatgaacagcatttgcagcagggagtaaaatttcacggctcatttaatcaccaataagttgtttcagttgcagataaccgccgataagtttgttatcgacaaaaatacgcgggtattgaaacgctaaactacgttgccttacccgttttgctaactcttcgatacgtgggcgatcgtattcaaagcccagatcgtttttcgcttctttcagaacgggataaaatgtatattctatccctttttctgtcaacagcttttgtgcttgtatacacccgtaacagttatgaagactttcgggaattccgtagatttcgactttcattcttctttccgtatggtttgagatcctgcaaaatacgctttttctctttgcctaacagtttttcgatattctcaacagcggttaactgagtgtgcagatcgaacaggtttgcaatctggtcttcctgcattttcagttcagattccatgttgatttgatagatgctaccaccactgaaaacatgttgcaaggcgaaacgcagcatcgcatcagatttacgtactggcatcggtgcgatgctcaacgtttccaggttagccccgaatgatggatcgatgcggagatcacgcagaggattttcctgtacagagcgatacgtgaatttagggatatccatcaggcacagatccgaaccagtgacaccagcggaaacctcttccggtgtagcgatacgcataacgttttcagcctctacacctttacccagattaacttcttctggttcttctggggtgaattcaccatcttccggcgttacttccttgaaccatttccatagtgatgcagggagttcatattcgtagccaccgtccatgataaatgcgcggtcttcaaactcaccgatcgaggtgcgatcaatcgtcacgtaacctttttcacggatgatgtttgcgatacctgttttccaggttttctctgcaaagatttcaggggatacggttaaaccgtaagtttttccagcgaataattccatgattacctcaaataaaaaaggggatgccgtaagcacccccgaattatattacttacttgccagcaatgcaagttttgcggcggcttcacgaactgcgcgagctttctgcgcaacaacttcgatcgctttctggtgttctgccagtgcgtcttctactgccagtgcagcttcgatgatctctttattgcgttgctgtgcagcaacatcaacggcctgaactgctggagcgtttgccggagctttaccagtaccgagttcacggaagaacttacgctcacgatgcatgatatacgggagagtacgatcttgtgtgatagatgcatcaccgtcgccgtcaacagactcaagcaccataataccgttgttatttttgatgtgttgcacaatgcgtttgttcgcggtatgagagcgcaggaaaccagcttcatctaccagaacatacggacgaccagcaacgaaatgtgtaggcatagcttcaaccgttgctggttgtggtgcagcaggttttgcaactggttcagttaccggagcgaggttaacaccaccatccagttcagaatccagatccggtttcgctggtgcaggtgcaacagacggtttgcctactggttttggctttttagcgcgttttggcgctggggctttagccggagcaacttctgtgaagtatttcgcttcccatgcacgaagggtgttcatagcgacacctgctggagcattgaaggtgtagcgatcaccgttacggcttgtgatgtttacaacaccgttcagcaattggtggatctgttttgattgaacactgttcgcaatgtttttgccgttgtcagtgaaaccttcgacatcaaccagcttgtaatctttaccagtttcgaagcgggtttctttggttctcaccgtccacggatgtgaaccgcttcctttggtgatgtttttcagtgggatcgaccacttccagcaatagtcacgggcttctttacgggttttgaaattcagaatcatgatattatctctcaattgggttaaatttatgctacgtggatatcttaacagaactaccaaccaggtcaagcgatatttttaatttcgatggaattctttttgaactcaatcattcgctgattatccgaaccgcgaaacggtttcttagtcggtagatccttttcgtaccgtccatcgatcagaacatcaatgaatggtaacagcttagagcgttctgtatcgccctgtaaggcttcgagggtgtaacccgtccaaacccacacatctttatcagggaacgtcgcacggacgcgctggagcagttttaagagcgtcggatgattggtgcggtaaaacggatcgccgcctgtaagcgtcaacccgtccacatggggatttgaaaggagtttaatcaactcgttttcagtctcttcggtgtatggtgtaccgttgcggggattccatgttgatttgttgtagcaaccttcgcatttatgattgcagccagtcacgaacaacactacacggattcctttaccgttaaccacatccatgttatagatgcggtcaaagttcatcagcctttcgcctctgggaacagacgggctttgatcgcttcgtcgataatttgcgggaattcattattcacgcgcttaacgatttcctgacgaaccgttacttcgaggtttttggttacgcgagcaataaacgcttcttcgtccgctttgaggtttccggttgcatcgttgattgcttccagcttgattgaatccagcaggtcggcgcactgttttttaacgtttgtcgtgatcagttctttgatctggcggataccgcctgaattgatatcgaaaacattgctgtatgcgtaacgtttctgaatgtaatcagcaaactctttatgcacaatcttttcgatttcgtgattggctggcatcatcaaattgacgtgcttgatcaccatgttttcgatttcttcggttacgcgcttaccgataacgctgtcaacaacgttcttgatgacagcggcttgcagatccattcgcgcttgtgttccttctgggaacaggttgttcagcgcctgtgtgtctaatttcagttgaatcattttatagtgcctttcttctcaaggatcagttctttgatccgttccacgattacggcgtattcccagttggctaacttctgggtatcacaccactgttgaaaatccttcattgcttttacgtgaccttctttccagtaagtcaccgcgatttcgttacaaagattttcagtagcagtatttttgattttcatgatttagcccctatagtttgttgtctacaggggcatattataacatcattcgtcgtccgtcaactcttttttgaatccgacataataagcatcagatccattccatgtggaggcgttaacgctacccaacagaacacgacaaggcatattgttatgcgcagactctacaacctgggatactgaatccagcggattgctaccagacacccagcggagcagatgacgatcatcaccgttaatcggatcaacgaattcaaatttgataccgttttcaatcagttcgtgcagaagaaagtttatcgctttgcactgcgctttgttaatcagcataaatcacctaccagatctttatcaattttggtgtatgtgagcgccggatcatacttctccagcacgttctttttgcacgaatggatgaacttttccatcgcacgggctttcatcaatactttgaaatcttcaccaaagcattgtttgattgtgggaattgcacgagccgctttgtcacaatcaatgatcagtttgtactcgccttgtgtcgtgacaaccaccattgagatcagaacacaaccatcaaatcctttttcattgattttatggaagttcagcttatccgtagtgcttgccaggttcgcataacgatccccgcgaatgttacccggagaactataccgcgaaacgttgattgaaggaatacgaatatcttcaacgatatcacatgacgcaacagcttcaacgaaatcaagaattctggtcgctttgatgacgtgcgccttaaacgaaccgacttctaactcatattcatctttccagcctgaatagtagtcaaccgcagggctaatcgctttcatgagcgcttcgggaatgtcaatgtgccatagctgttctgcgtactgtttgcgccagtctggataagttttacgtgctggtttgaatgcactgttgccgtcttcgaacatcatttcacttttcctctctttttcgtaaatgtcgtacacacttcttcgttcgtaagcgtcttttaggttgctgtttactatactatcatgcgtcagttcttcgcaatactttttatcccattcagaacacgcatgttcaaccatttcctgaaaaacgcgctgtggaacattcccatctacaagaatcctcaataagcgatcagtatcatcattcggtaaagtatgaaagtttttaggaagtttaacatagaagtttctcgcacgagaaatcaaccattcttcaccgcgatcacgttcaatagtgtaatcgtacatagcaaaaaaggggctttcgccccttcctcttatttcgcgttcagggagtcgatgtaagcgctaacgtcagcggaggttacggaagcggcatttttgccacccagcaacacatcaatcttcgtcacgatggtatcgacgcttacggaagtgtggcctacagcggcgatcacgtcttccggtacagtcagacccagactttcggtttgcttgttcagttcgatgatctccaggttgattttgacatcagccagtttgcgatccagttcgacgacagagagatcaatctctttgttcatcccttccagttcttcgatcttcgtctgtaagccctgccagatgttacggtgttgcagcgccagcacgtaatgactgttggacacttcctgccccgccgccagcagttttttgatctctgattctttaccagtgtgaaggtttttgtgttcggtaactttctttttcagcttcgcgatttcctgaacagcagaaacgcgagtatgttgcagacggtcgatctctttgatcaggatacgtgcagcactgcgccatgcttcttctggggaagtgttttgttcgattgcagtttcaactttaccagtcacgaacgatacgagtttcttgaacataattttgccttatttgatttcgaattgattggtgaaccattcaggggctttaacaactttcccctctctgatataaccgattttacatagttcgttggttaagtcaagtctttttccacccgccatgtaaaattttaatctgcttactgggatcaccggacggataacgtcacgatagccgaaatgcgcactacgcaccactatagagagcatacgcaagcggttgatacaaccagtatacgaacgcccagtagcgcgggagaagtcctccagcgtaacgccaggggcaattgcacctatcagatcaagataatccttttcaacccagaaccgcccaacagaacatttcgatacaccctcagccattaccgcgtttgggtgtttctcgtcttcgcgcttctttttgtcctcaaggaacttattgaaccggatttcttcgagtcggttttcccgttctacccgtgcgcgtacacggaagggaaacaaagtatcaaggattttcccgatcatatcgttggctttccgtttggtcgtttaagatcgaaaggaacattcacaggccggacggtttctaattggagatattgttccatccccacacgtttaccgcctactttgttataacggatgttctttccgtcatagcctacagcctgtgaaatgtagtagttcttagtttcgcgtaaacactccatccattcttgtgttccggttttgttgcgaacccgcgcctttaatggaaacatcattcaccccgtagaactttcagttcaccagacaaacgatgtagattggcggttgcagtatcataacgtttttcggtgtctttcagggtagtttcccgcgccttacgcaagaatttttccagatcacctggtttcgtcaccagcttaccatctacgtaaattcgtcccagcaggtgagaacaatccagcagttgttgtgcgtcggctttttcaacagcaggtttaatcgcgacaaactttttaaagaatccgcgatcctcgttatcaaacagatacgaatcttcggaataccatgttgtgccattggcatcaacgatcccactaacacctttccggttgcagtgcgttaccttgataggaaacacgacagatgatagttgattaggcgacagaggactaccacgcaaagctaaattgcggtatacagtcccaaaactttcttcatcgcgaaattcaaaatagtcttttgtccagtacatcatttttcaatacctcatagtttcggtatgtgcaatataacaaaagcccctcactttcgcaaggggctttttgattaattttgatgcttagttcggtgcatcatttctttgttcttaccttcgttgaatccacggacagcaggagcacccaaataaccgcatgtacggcgcgtgacgctcattttagccggatcgtgattaccgcagtgcttacagtggaaaccttcttctgtaggcgtgaactcgtcatcagagccacatacaaagcacttatcgaccggaaggttagttccgaagtagtccagtttttccatcgcataatcccagactttttccagggcttgcaggttgtttttcatatcagggaattcaacgtaactgatatgacccgcagtagcgatataatgataatcggcttcatagtcaattttctcgaacggtgttaccttgcggtcaacgtccaggtggaaactgtttgtgtaccagcctttatccgtgacacctttgacgcttccgaacttctcaaagtccagcttacagaagcgatggcagagagattccgctggggttgaatacaggctgaaaccatatcctgttttcttcttccatgcttcggttgccgcgcgaaggtactcaatgatcaatctgccgatattctgggagccgatacgatcgaatgggtgttggcctgagccaaacatcaacagcgtttcatgcagtccgatataacccagactgatagagctacgcccatttttgaacagttccagaatttcatcatccggtttcagtcgaacaccaaaagcaccttctgtgtacaggatcggcgcaacactggctttaacaccgcgtaggctttcgatacgagtcatcagggcttcaaaacacagttccagacgttcatcaaggatgcgccagaatgcgtcgtgtgcgtcttcgttttcctgtgcttccgcttcaatagcgatgcgtgggaggttgattgtcaccacacccaggttattacgtccatccagaacttcattaccgttatcatcatgccacacgctaaggaaactgcgacaacccataggagatacaggaacgctagaaccagtaatagcgcggttattagccgaactaatgatatctgggtacatgcgtttagaagcacattccagagccagttgtttgatgtcatagttgcgatcctctggatcaaggttgattcctttttccatgaacataaccagtttagggaataccggagtgataccctctttacccaggccgcgaatacggtttttcagaatcgctttctggatcattcgttcaaacatacccgtaccagtaccgaaagtgatggtaacgaatggggtttgaccattggcagtatgtagggtgttaacttcatattcgtaagactggaacgcatcaaaaacatctttttcagtcttttccatcgcgtatgtacgatcgccagaaataccgtatttccttgcggttttttcgtgtttttcatacgtcatacgagcgtatggagccagcactttatcaacattcgcaaaggttgtcccgccgtactggtgagaagcaatctgtgcggtgatctgcgccatgagagcggtagcaacaccgatcgatttaggcggttcaatgtccgcgttacccatcttgaaaccgttctccagcatacctttcaggtcaaccagacagcagttagtgtaaggggtgaacgggctatagtccagatcgtgataatggatgtcgccggagtcatgcgcttctacgatatgtttcggaaggatatgattaggggcgaaatgcttcgctacaatgcccgccagcaaatcgcgctgtgtcgggaatacccttgcgtctttgttcgcgttctcgttggtgatctctttgttggacagattcaccataccggagatatctttgaacagcttacttttctgttcacgggcaatatcgcgatcgtggcgatattcgatgtatgcacgggcgaccgctgggttcgttttcatcagggattcttcaacgagttcctggatacgggcgatcttcattgcgctaccatcgcggatctgattgtactgaaccagcatgattgcggcatcagcatccgtcatagtcccgccagctttttctacagcaatacggattttttctttgtcaaaatcaacggctttgccgtctcgtttttctactttcatttcgttgccttcattaattgctttctatattttgcggttaaggctttgcgttcgtctttgtctgcgtattcaaagcccatagaaaccatttcggcaatcatatcaggtttggtaagtcttgaaaaccattttaccttatctggtatgaatttgtcatgaatacggttttcggaatagtcttgtttcagatatgcaagcaagttctctaaccactggatgtaatcaacatcacgggacaccagaccggatctgttgaatttgtgcttcacaataccttctgtaccgttgcataggttacacagtaggccgcgcacacgtccggcgttttcgccgtctaaagcatggtcatggtcaaggtgatgtttctcgatctctccctcaagaggacgtttgcagagagcacaacgcccaccttgtttttcaaagagggcttgcttgatagtcgggtagtcttttttggtaattcgtttcgtcagcataataacaccattcagtaaggtgtcattatttattacagggtgcggacgtactcgcgaagttggtcgaatccgcctacgtgtttcccgtcatggaaaatctgaggcatagtcatccggcgcgtaccaaccagggcttcgagttcgtcgatcaccgcttcattcagcacaggtttaccgtcttccacggaatccgcaacagacacgaactcatacggatgttttttcgcgtccagcaagcgctttgagttcaggcatggagcgcagttatacacagaagggatatagccataaattttaaacatgttaacctacattaaatcgttcagtgttaaagggaatgtatttacgtcgcgtttctggtagttgcacacgtagacttcttgcgttttgttttgctcgtaagagtcggtatgctggcctaacagatactttttatccagattatgaacgcggtatttctgcatccattcaatcaggatatcattttgttttccggcatggtgagtcacgttggacagtccgaacatgattccttcgctgtgtagttcatccaggaaagcatataactcgcgttcgcgatcttcgttccagaacttgttatacactgcatcggtgatcaggtacggcggatcacagtacacgaaatcattttcacagatatcaatgtcacggaatgaaccactggaaaactcaatacctttcacattctttttgaaatgttcaaagcgttttactgttgcatcgttgagcgtccggcatccgaaattagcgttgaagtcgcctttgtcgtttgtccggttaacgttgctgaatgaatgcaggatcaggacatagagccataacggatctttgttctggttgtattcatcacggaatttcaaatactcttctttcttgtctttccccagacccttcgatgcaatcaattctcgcaccggagacaggtcaggaagcgttttaagacgctcatacatatcaatcagcgtcttatcgtaatcgttgcttagaacgggtttagggacgtttaacgacacactaaggccaccgcaaaaacaatcaatgaaacgcatgtatgaacttctttcggggaacagcttgaagagttcaggtaatagcgactgtttgttgcctgtataggggataacacccaaataactcatagaaaagattccagattgttaacgtatggctgaacacgaagaatagaatcgtgataataattctccatcagttcgaagcctttgaaccgtctgttggttagtatcgacattttcatcactgtaccagagccagagaatatatcaagaaccaagtccccttcaaccgtccacgttttaatgtgatcttctgccagttgttcaggaaatattgctgggtgtttgaatgcaatctcgtccttcgttgagtgatttcgccctacagcgtaataccagatattacccttaattttatccttgccaacaggtttacgtttcttaccggaacgggctgaacggttcttttcgttggtttcggaaaagtagctgttttgtcgtgcggtttccttttcagggaacttacacggaatgcggatcgggttgaatgtttttggtgcgccttttgtccacacgaacatgtattcaaagtcctgttcgtatcggttatggttcttcggtagagcggttttgtgatagatcatcgtatcatgcaaccgaaaaccttgttcgagcgcgtacaaggcttgacggaaagatgtacccgtttcactaccgttgatagtcgcgtcacccacaacccacacaaccacaccaccgggcgcggtaacgcggtacagttccgatatcaactctttccatacgtgttcaccccagacatcaccagagccgttataatggcgcaagttgtcatacggaggcgaagttatggtcaagtcaacagaaccagattcaagctgtttaatcagctttacggagtcgcctaaatggaggtcaaccccttctttgattgtggtaatcataattcaccaagtcctttctcaaataaggcgatcgtttcgtacttatacccacgattcaccacgaagcaataattttcgcctaatttctcaagcattgcaatagcacggtgttcatcttttttatctttcaacagataagcaattcgaacaacctcttttagtgtcgcgttgtccacctgttccaacttgaacccgtagcccaccaacttacaaaaaagccccttgcgagcgacaaggggctgattgttgtagaagactaccgatccgttatcgttggcgcggatattaaatccttgctcgctcacggataacccctactgtatcggaggtgtttaatacaccgttgtcgtaatacgtaatcatcgcatcacgccacccgtcaggaatctcagtttccagagtgtcgattgttttgaattccacaccgttagtgatggtcatcagcaaacctttcttactctgtttccattcggaacctttcgggcatttgtaaacgcctttccacacaccattcacgaggatagcgcacagtttttcagcatacttttgagtgtcgcgggtaacttcttgcagcaaaccgccgcccataccgaacgcgatgttctcactcgcccacttgttcgcttccatccaacttaacacacggttgattgtttcaggcccgtggatctcgtcgccctggatgattcgaactgaattatgcagaactttgtaacctttgctgtttacggtgtaaccgaagatttcgcccagtttacgcagggtgtacatgatgttatcaatcatatcaccggaatcaggacgaacaaccagagtaccaccagcagcaatgatttgctctttatattcagcgatgcgatctacagcgcctttgtagtcccaggaatcgtacacacaagcgtagaaccctgtaccgaacatttcgatgctgtttttgtatgcttcgtcttcgttctctttaccgtaggaaatcgtagtcgaatgttcgcgagccggaattgaaacaccgattgcttcgacgttttcaacttcatcaaacagagtttgatagtccgcaaacagactgattgccataatcataccttcaacggtatcagtcccgatgaagttatagaggtgtgccagcccaccaatacccgcagattcagcagaggtcgcgccacgcgccccgaaatcatgcagacgtgtacccagtgtgatgttatatgcttcaccagtcaggtcagaagtcatatcaaggtaatgagccagaacctttttacactcacgcgatagcgttgctacagatgacggataccagataccgcgaatcgtcattgtctccagccacccagccaaccatgagaattcatgttcggcgtacacagtcgcaacggcatttttaaccggaacaaccgtaccttctgggatcgcacggaaagtaacagggacataacccagttctgcgatcttcttccacccttcgtagttgaaaatctctttcccaaagtgcttacggtaaagtacccgtgccaactcaacttgtttcatggtaattggttcagcaagaacccgcgcaacgaagttaacgccagcggttactacttcatcaaacttaccaccgcgagattcaatatagaacatcgctgcatcagtgccttgtggatactgcaaccagtgggacactttgtaggaatcagttgaggtgatcaggctattcagttcattaaaagttttcatttaaacgtactccacgttttgatttaaaagatacgatccaaacgttctggatggatcgtgttccagtatttactcttacagtctttcctggattttttaccattagagcagaacaccttatgatatgtcgtcttcttgtgcaactctttgcacgtaggacaggtgatcatggttcctactttagcggcttttgcaacatcgtacaattgtttgatgtccttctgccgctcggacgtaatgacacgcccgtttacttctttgacaaccgtttcagttcgaatcgaaccatcggaatatttaacaggagttttgacttgcttcggcgcatttgcttgttgcaaaagccttagagtttctcgacgtaaattatgaccacaaaaatcatcatcgtcatcgtcgtagccaccccagctatcaatatattctgcttcactcatgctcgatccttagttgctggtcagtaagaagacccggttgtcgctatagtcgatgtagcaatcccaccaacccgcacagttaacaccatctttttcaaggcttatgattttaacgctggttgcaacgtcatcatattcataaaccgcacccagttcgttcagcattgcttcaacgttagcccgtaagcctttaccgttgtgtgctacaccattcagtgccaagcagtagccagcgcaagtaggtactaatttgatttccatgatgttttccttttgggttagtgtcttgtctacgggagctatattaccacactcataactcccgtcaacaagtttttcgaattattttcaccaggtgatgtaataagtcagatcgctatatccgtcacgcttaggatcgctaaaattggtctggatacgacgcgaacccgcgaaggtattgagtaacgcagcttgtcggttgcgctgtgtatcgaaagtaaacccttcttccgccaaccattcacccagatccgcatatgctttttcggtacattcctgatccatagtcttaccgataaaacgtttcatatcaaaggtatatgattgtttagtcggatatttcaggacatactcggaaatgtctttgcgggatgcttcgaccattttcgcgttgatttcgtcaaccagtttacgcgcacgttctgccagtgtcgggctacgtccgcagcggggatcatcttgcgtttcgcgtttgacccacgatgtcccgcttcccgcctgtgcgttcacaccgattccattgatttctaccattatgtttcgccttttttaatgcctcttcaactgcgaggcgttcgtaattacgtgattgttcgggagttatcaccagagaaaatccagagtaggaggtttagtgttaatccctaaagtatcgcagacttcatccagaacgttttgattccaaaggttgaacgttggaactttatacaatctggcaagccttgcagcgatcgcagtaccacctttaacacaaaaatctttctctaccgcccagaatagaacaaaatctgtaggtttgtccaggttttcggttaatacctgcattgaattgcgagcgtatcggcgttgtgtccattcgctttggttgtcgaagtgtccagctacctttctcgcttcgtcagcggctttgtacgtgtcgtattctgtatagtcgatgatatccttaccattcgaatacaacccgttaaaaccgttctcagggaggattatacgccgtctttctggtgagtagtcaaacatgaaatggctatccattccaggagcaccaccagagtaagcgaagatcccccgatcacttaaagcacgtccaatctttatggctatactcgcgatacgttcagggggttcacggctaccgatcagggtagccgtttttgcgttttcgagaacagttttaaaattcattgttcaggattgcgccccagttctcacgaaccagatttgacgcttcgttagtgaaggttttcttcgccagcgttggattttcgaactgttccaggaaaggcccgtagttacgttcgatttcttccagcgcgtcctgtaccgtcagccccatcacgcgaccgaaatctttcgcggtgagattcgcgctgtcaatttttgacagaacatttttcacacggttttcagtcaggtagcaggtgaattcgttcagcttcactttgtctgtttctgacagttcagaaggagcattgaagcggttcgcttgcttgttcttcttctctgtgaacttcgtcgttttgcatttgattgcaacgcgttcaccgttcggcatgaaagcgggttgaacaggcttcatcacgaaaccttctgcgatgttctcaccttcaccatctttcagcgtcatgaagtttttgaactcaggttcaacgccgttctttgcagggatcgcaccggagttcgccaggttaaccaccgaatcaaaggtgataggcagtgtgcggatctcgtcaaacgtaccgtatgccagcagtggagccattttcaagccaacagcaacagcgtaattcgcaacaacgttatcagggaggaactgaccattgacgcggatatcaaatacgtagaaatctttttctccgtagtcaacatctttctgtacaccacgccccgcgaattcgccgtatacctggatcaccagttcatcgctatactcaccgcttaactgacgcgcagtagagatcatttcccacatcttacgaacaggttcggagtatttcgcaactacgggttcgcaaccgtagaactgttcagcagggagaatttcaccgctacgttttgccggaatgactttgataccgtccgaagtgatcaggctaaagttagccccgtggatcttttcacgcgcaacccatacgccaccagtcaaaccattcatgatcacaccattgatgaatttaccttcataatggttagtcagagaagaatatttcacaaacataattaacccttgattttcagttgtttttcaatttgatacgcagctttgcgtaacagtttcagttttacttctggaaggatcacagaacccttcataaacgcatcgagatttgatttctcgctattcgcggcgctggttactgcgatcgtgttttcaaccgtgtatcccagagaagcgttgattcgttccattgttcgggagtcagagcaaccgcctttgttgctaaacggtctgccggagtaagaacatacgggttcactcattagcttcgcccagtcgcttaacgtcagagcaaattgaaggttgcggttacgcgcatcatcgtttttactgttgtatgaacgagcgacacgcagatcgaattcaatttgctttgcacggcggcggtgttctaactcagcaggatcgagtgataccatagtttgaactttttccggttctactggctttggttttgcttcaaccttcaccaaatcctttttgatagtcgaagttatcacgcccgaccagcgattcatcattgaagacatataaaccccttacaccaaacccgcttcctggaacgccagcgccatagcgccgttgattgctttacgtttgttatctggacgcggatcgcgtttagctttggtcttaggcttacgctgttcttcacgatgtttgttgatatacacacgacgcagaacatgtttcacttttggattttctgcgcggaaagcacgaattcgctcgatttcctgaacaatcacgtaaatgtcgccgttatcgagcatgtgctcacgggcgatctgtgcatagcccagtttcagatcattgaatttaaaatgaatctgtactttttcctgctggctaacttcgctgatattacgctgaacgattttcatagttactttcctttagtagaatcaattttacgaataaactctaacacttcggcatttctgctgtcaacattttttagaacaaaagttacaactacatgaacaccggatgcttcgttccaaccatcagcacacgggatcatcagatcatccagagtgttgacaaggttttccatatccgcagggtgatcgacaaacaaagtttgtgtttcggtgatactggctttgaagcgtttcccgatctgtgcttcgagttcgtccagcataccagcagataacgcggcgatgtcgatatttttcatcccaccatacacaacatgaaatagtttcatatgcaactaacctcattttcatatttttcgcgttcgaaacagtcgggttcgttccagatctggtcaaactcacgtttcgtcatgatatagccacgggcgattttgcgagttagatctgaaccgatcggagcataccacaaaatcaatttacacaccattccctgaaccagacaatcatacagccctttttccagggtgcgtacatctgttacgctatcgactaaatcgggggcacttcgttcaggatggtctttccactgactttcgatgatgtcgtttagttccctgtgaaaataaatccacgattggaacgacgcatcaggcggatttgatttgcaaccagcaggataaaattcaagcattttgatcagcctcattcgcaatacagatcgccataaaggtaaacataacccccaacgcaaccatccagatcgcggttaaatccccatacaaagaagaataaccacccatcacttcaacgcgatatcccagcaagaaaacgagatacgccaacaccttatctttcataattcctcacagaaagcccatgcagcatgataaacgcttgcgcctttgtcatcgttcatgcataccacatctaccggacacacaacccgatacagtaccggatcaccacctattgaacgtgcagcccttccagcatagatacgagccagcccgatatcagcagtgaagaaaacacgatccagatttttctttctgcctttttcagacagagtatcagaatcacaaggaggcaacaacatgctttcgattccggcagcagtacatgatccgtgatagaactcaacgaactctttgcggcagtgaatggtattcatggttatctccttgttttcagagattacagcttatcgctattcgcccgacaagtcaacaaattctttttcaacgtcttcttttgttctgaacaggtaatcagtaaggcgacccgtcatcaattcgcgagttttagcaactgaacgaacacggcgttcacgttggctttcggcatcaccaattccgtgacctggttcccacccttccatatccaacataatgcgcgggtgcatcatcacacgaatatcgtttccatatgaatagctgttatattgcccgaatacaaatcttttgaatttttcatgatgaacatcatcaacttcgacctgttcaccatagtacacaatttcatcacagaacgcagcgagaatcaaaccaccagagttttgaatttttaggatcgcgtagaccatgcggtgacgtgcttctgcaattatatcatgagagccaaatccaatctcttttgtcccgaagcgacagaaaatagaataggtgatgttcagcaggtatttcgcgacgatttgccattcattatagataggattgggattgacacggtatgctgatttatattcgcgacgcagttgaagaagtgtttctatgactttagcaacactccacccgttcggataagtcgaatcgttgcgtttagcaacagcaattgttgaatttgcgtataagtggttgaaagacattacgcggacgttatcgacgtaaccacgatcgcgagcactccatttgaagtaatcccattttggatcacaatctggacgcatagacggggtatgccagcgcttgaaccccaagagattacagaaatcgtcaatcagggtatcgcgacgggatttatattttgactggtcgccaagagcagcggcgttgatgaattcatgcagttcatttttcataattgttaccttatggttaaagttcttccggcctatccgtcgaacaattgcactataaacacactcataaaccgtgtcaataaatacttttaaataaacacctggagttctaagatgaaatcattcaaagactttacgagccttgatgaagcgctgatcaccttcggcggtaaggcttatcctaaatttggtcaggtagtcatcctggctggcggcgcgggttctggtaaagggttcaccctcgaaaagctgttaggcatcgaagggatcaccctggacgttgacgcactcaaaaaattggtcatgggtagtaccaaactggcagcagagatcaaagcgaaaactggtcacgatgtcaaaacaatgaacctgaaaaacccggacaacgtagcaacactgcatcatgtgatcgcagacgtgttcaacgtatccaacaaaaaccaggcgcgtgtgtacgctggtatcacagcagcaccggaagaccgtaaaccaaacctgatctttgacgtaaccctgaaaagcatgagcaagctggcaagtatcgcccgtgatgttgaagcgctgggttatcagaaagaaaacatccatatcgtttgggttatgaacgatgttcatattgctatgcagcagaaccttaaacgcgatcgtgtagtgcctaaagaaatcctcatggatacccacgaaggggcagcgctcactatggcgaagatcctgaatatgggcgactctctgaaacagtacatggacggcgatatctggatcagcttcaacaaagtaggcattgacagcgaaatcaagaaatctgacaaaggcggtatgtttgtcgttaagtctaactacatcaaagttaaggcaaaaggaaagccgcagaaatccattgaccagcttgataaagagttagtggctaaagttgcagcatacgcaccgaaaactgatacatggggttgacaataggaacatatatgaatatgatgcacacacaaaccgaggaattgatatgaaaaagtttttgttcgatatggatggtgtactgttcaactgggaaggttcttttgttccgatgtacggagacccggcgagaatgccggaagaagaattgaaaaaagcgaaacaggctatatcacaaactgacttctacgaaaatctggaaccattacaagagggcatcgacctgttctgtcatttgagaactttaggtcaggttgcgatcttaaccagcgtagggaaatacaattccgatgcggtagcagaacaaaaaagaaaagcgttgatgaaggtgttcggttatctgcctgaattccactacaccaaaagcagcggagagaaagcagcatatgcggacaaaggtatactgattgatgacagggcaaaagctgtgttgccattcagaaaagccggaggtaaagcgattctcttcgttggtagcaaagaagaagcattgaaagaaatcagaaaaattgcataaaagaaagggaaccattgcggttcccttttttgtttatggtgtgtaatccgcaaaggagcggttcacatcatgaatagtgatgttcatatcgtcgttcaggaaaacactacgatatttccctgcgctatcccatgcttgacgatgcttatcattgcgggagatcagagggcaacggtaagcgtgggctttcagttcgttcagatcccgacaagtccagaagtctaaacgtacaatacccatctgtgcgcatactttatccatgtacgcgattttttgactattcacccaggacgggctttttgcttcgttgacgagaataaaaccgacttcgcgatcgcgataggtcatgccccatttcatcatatcccaacccaacacctcgatcgccagtttttcatagaaatctgtacgaaccagggacgatacagcagcttcatattctgcatctgtcatgttttgtgggcgtttgccaaatttggcttcgattgcgtcgctgaattttgcgaatacatcattgaattcaaatagtagcatttttaccttcttagttgttattatggtgcaggtttaacgtttaccgtcagagttgcagtaacagatccagaggttgctgttacgacaacatcaccttcactaaccgcatgaagtttaccaccaacgatagaaccatgaccggaagagtcaacactcagagtcatttctgtaccagaaggatcgatggtaaacagatcagttgcagccagatccgcatcacctactttgaaatcagcaggagcggtttttggtgtaattgttacgacaggatcagcaggagtaaaatcactcagcttatacagataaccgttgcgggattcgatgaaatcaacatcggtgtaatcaatatacgcctgtttcagtgtgtcgaattctttcgcgtatttttcttcggcataatcacgccagtcttcgcttgcagcattcgcagccacgatgatatcaaagatccaccacggcaaataggtaaagctggtgttacgccacgggatcgggtgtaccgtagtccatttttctgtagccattttcaaaacctcttagtttttctctatttagagaagtaaaattttgccgtcacaagacggacatttatcatattggttcacgcgcccatagccgttgcattcaggacagaacgggtttgttacaccgaacacattacggatcgcgtaagtggattgttcttctgtcagccctacgaacccatcggtattgatgaaatgttcactctgttccggtagcatatcggtatcgtcatcaaggataaggtaattcttacatccgaaggtgtcgatccatgctttgatttcatcaccgcgtcctgcttgtcggtctgttagattcgtacaggttttcccaatgatgcgatacaatccccacgggtagaagatttcccgtagagtatgggttgtgttgccgatcctccatgtagaggaaatgacaatatcacagttcgcatgatttacgatccggcgcaggtgtcgagcacattcaatgtccatatgctcaccaaatttcatgcaccgcatattatttagaacgccgtcgatatcaaggaagatgacgtttccgatctctttaccttctgataagtctttcaggcattcgtgatttaattcagtcatattttacctacaaaaaagggggcgtagccccctttgaattttaatagaaaccgcgagcttcgttatccaggcgacggtctgcaatcatgtgcgcttccatttggcgagaaacataatcaggatcgcattccatttttgcttcttcgtagttgtcccaggtatcagcaacccattttgaaccgttccaacgagcataaccaggttcagcagggacaggataatcagcttcgtaagcgtggcgcagtgcttcttcaacagtatagtaaggagcatttgaattgactactttcttcactttaccatcagcccaaacaaacagaactgggtagtaagcatttttcatcatttcgtttttcattttgctttccttcttcactgcgagagccattcccccgccttcgagtacaaatatactttaaacgagggtatgcgtcaacaagttttttagcaaaaagtgctaaaacttaaatgtttcgaatcggctatttctggtttcgcgaacacgaacttcgccatcgcgcacgatatagaacgcaagtgatttgattgtgtcgattgcgcttgcatgtggacagctatcaggatctttgtaccagtctggggtttgtttaatccagtcatagatccaccacggacaggtataatacccgttagaactcgcagagcgccccatcatgaagattgtcgggctaaacccttccaaccataccagttcgcctttggactcgtcagaagcgcttacaggagcttctacgacatcaggtactaattggatttgatcggctacttccggcgcgacctctttaacgtactccataaaatccgcagaagcatcaataaccacatcgggaacgttcggggcttcgatgacaggttcacccatagtcacctcacctttatatgcgacgatttccggttctggtgaatcgatcagcagttccggcttttcttcatcttccggtaaagcagcaaccagatccgccagcatgttatcgaaggatttttgtttgttcagcttaaccgcaaacacagtcatagcgtaatcggctaaagcgcctttctgttcttttgcgtcgagggtacggaacccatcaactttttcgtaatcaatgttcattggtatctccaagtgtttatccaatatttatgacataaatacgtatatactttgtacatagggtaatcatagtggatattgaagtcaaatttttaaacacaagccacgtacagattcaggcagaaccaaacattgtctatgaactgcgtgactatttcagcttccagcccccaggctatcagtatcaggccaaatacaaatatggtggatggaacggttacatttacttgatggactacaacgggaaactcccgtatgggttagcctatctggtatccaaattcgcagaatcacgcgggtattcaatctgggttgatccaaagatccacgaaactgaggatatcacgcaagaagattttgataagtgggttagcgaacatccggtttatgacggcgacaaacagatcgacccgtactggtatcaacgcgaatcagtgttccacggtatcaaaaaccgtcgcggtgttctgaacctgccaacatcagcaggtaaatctctgattcaggggcttatctctcgttggtgtctggaacattacagcgggaaagtgttgatcatcgttccgactaccgcacttgttgaccaaatgatcgaggacatcgcaaactatcgtttgttcccgaaatcggcaatgctgggtatccgttccggtacagcgaaaaacagtaatgcactgatttacgtttctacctggcaatcagcggttaaaatgcctgccgaatggttccaacagttcatgtgtttgatggttgatgaatgccacctctcaacaggcatgagcatcaaaaagattatcgacacgatggatcaatgtatcttcaaactgggcttatccggttccctgaaagaagggaaaacgaacatgatgcaatacatcggtgcgttcggcaaagtctttaaaccagttgatacgcgtcgtttgatggatgatggacaagtcaccaacctgaaaattaacacgatcttccttcgatacaaagaagaagaggtcaaaaaattgaagggtgcggactaccagacggaaatcaagtacgtaaccagccacacacggcgcaacgcgtggattctaaaattagcgctcaaattagcccgtgagaagaacgaaaacgcctttgtgatgttccggtacaaagagcacggaaaatggctgtacgagcagttgagcaaggtttacgataacgtggtgttggtcaatggtgatacagatattgacgatcgtaacgaaatgaagaaaatcgcggaatcgacgaaaggtttaatcgtcatcggttcgatcggggtactgagtacgggtatctcaatcaagaacctacaccacatcatttttgcgcacccttgcaaatctgctgttgtggtgaaacagtctatcggtcgtgtacttcgtaagcacggatcgaaagcgctcgctactgtatgggatatcgttgataacctggctacgctgtcaaagtctaagacagccaaaaataaatacagtgcgacaaactacggtatgaaacatgctatggaacgtgtgcggatctacaatgaagaacgattcgactacgcgatcaaacaggtagaaatttaagaggccaaaatgaaaagttttactacattcgtaaacgaagcagcgattgatgatttcatgaataaggttgcttcgtgccggacactagaaggtttgaaagaacttgaaaagtattacaacacccgcgtgaaagaagtcgaggttgcagcatccgatgacatttcaatgcgtgacgcgatcaagggacggcgagaagaactgaaagccgaacttgaaaccggagaagaagagaagttttaaaaagaaagccccaaccgaaaggaaggggctttttaatttcggaaaccgtttgttccgacacgtacatttattttatttcagtgctgtactattctgaattacaattaactggcctttactcgaaggtatcttaccaatcaccccaccgaaagtaaattctatcggacggcgcaaatgggtacgccacacggtaagcccaagccccacaaggggtacacatctatttactgctataaatctgggcgttcgtcttcgatacaaccgctttcaaacgaaattcgaagtgcatgaaccctggtcacacattcttccatcaatcccagcaaacgaaatacttcgttaaagtcgatttttgaatagtctttcatattcacacctacagcaacatttgaacttcgttcagatcgtcggcttcattgataccgcgatcattcctttcgttgagatattgcaaacatacgacaccgcagatcgggccagcttcattgacaaacgccgtattacgggagttcatcggttgtttgcacacaacgcatttgcaatcaaattcttctgccattttatgcaccactctcaagtttacggatctccaacatgtttttgatggagtagcctttgttcttaacgatatccagcgcttttccggtaaactctgcaatcagttcgaagtattggatcagcttgttaacttcaacggtcttaggatcaccggagatagcaattttgatttcacccgaaccagtgtaaatgacatcggtcatttcgctttcgtgtctaccagtgtagaacagtaaccgatcttttacaatcgcttctttcttcgcctggagttgaataagttttttcttagcattcgaatggtatcgaagccattttgaccaaatcttcggaatgtctgctgattcgctttgtaacttcaacggatcaatacgcatatcctcttcaagttcagcctgtagatcttcaagttttagttcagccatgtatcacctcaaaacaaagtaacattataaccagttagatcaagaagtcaaatctacgagcgaagcgagtacatgaacgaacgtagtgagtgaatgttggttaaaaagtatacggaaatgtactgttttctctatatataaaatataaatattataaacagtacatcgtacttacccatcactcacttcgttcgtgaaaactcgcttcgctcgtttgaccttatagatctttattactataatggtcttctcaaaacaaaacttgttaacccagtttaggtaatttaatacctacgatctgactcagcttagatttacctgcaagagcagaccaatcatcacctttgatcaggcgatcagaatcactttcagcagtatacgggttcacggaaagaccgtaacgcatcagaatagcaacttttggttgcagggatgccggatctacggatactttgattgaacctgcttcgtcagcttcggtatacggagcgaagaacagagagcctacgtgatccatatcacccagatcatatttgcaaccagtcagcatataatcgaacgggctgttggtgtctgtatagacataataaccgttgttcagcttacctgttgccagtgggtgttgttcgtcggtttcgtgcatccaaccagacgcagccagaatgcctacaacacgcgctgttgcgaggacgtaggtagcatcaaatgaagtcgttctattcatttcctgccccatttcacacgctaattgatacaggatacgacccaatgctggggcatccttcgcggtgtatgcggttgtgccgtcaaaaataccatccgtaacgagtccatccacgttgtaacgtttggaaacggtgatcagagtttgaataatgtctttgttgacttcttcacttgccacggttcccagaatgtcttcgatcaccccatcagcttcaaactggtttgcttccaaatcctgcatcagttcaaccgtcatttcggttttaaacttacgcgaacgtaccggaatattccagcgatccatctggaaggaggttgacgcgatatcttcactggtttcatacttagaagtatcagcggcttcgctaaccagacgaatcttgctttggaacacagctttcatgatcgcggtgtctttgtcagtatccagagtgttcagggtaataggtgcaatcacctcataaacaacgtcagtaccgtcatgcttgaacaaatcacctttaacgtaggctttagtcagatcgatttcgtcgatgtctgtacgtccagagattcggcctgaataggttgcagcactggagaaagtcatatcaccgttagggttgcgatagcgaacaccgaacagtgttgcaacagggagttctgtttcttgtacagcaaccagttcatgatagatcaggttgttaaccgcgcgagtcaaagaaaccagttctgggcgcgtgttctgtacgttgatgtcggtcgtacctgttgcttcgttgataactttttctcgtttaccagacggaagcgaagactgacgcatcaacttgtgaattgtgtagtgtttatcactcatttctttggttcctgaattagagggctttttacctgtatctatttacaccaacaaaaaaggcaacccgtaggttgccttttagtgtaaagtcgattacagacctttaacccagaccttacggaagtatgcgtttttaccgcacatttctttgctgatcataccagaggtgatacgatctgccggagcctgagagcgagagttcgcaaacgggttgatgccgataccgtaacgagttttgaagcccattactggctggaagttcttaggatcagaaccacgcagcggagtcagcgcaacgtatggagcgtagtagataccagcatccatttcgttatcacccttgtagcccacggtgaagtaatcctggcgagcgtactggtcgatgtacactttgtaagtgccacccagtacaccagcgaataccgctttagtggtgtctacgttcagagttttctggagaccctgacctgccggagtgatgccgctgtcgatacgagccagagcggaaaccacgttacgggaagcgatgatgaagttaccagcaccacgaccagtttgacgcgcgatttcgttcgcttctttgtcgatctgaatcagcagagctttatagctttcaccagcccaacgagcgccgcgaatatctactggatcttggaagtcaaacgcaccagctttagagccaacggtctgagtgaaaccagtcttaccaatctgcgcggtgtagttgatcaggtcaacgatttcgcggttgatttccagcatgatttcagttgccaggattgcagacagttcggcgtcagcgtccataccgtgtacagcacgaagatcctgtgccagttcaacggaatactgtgctttcagttgacggctacgagcttcgataacctgtttgtcgatacggaaagccatttcgttccacgggttagcgctggaaccgttgaagttttcctggagttctgctacgctggtagccataccttcggaaatttcagccagagtgcctttctcgttttctgcgattacagcagcatccagagcagcagcatcagcaccagttacggttacgttgccggaggttacgttctggaagtacgcgataccagtttcctggaatacgtgcttaacgatagcgccggaagcgatagcagtaccggaagcgatagcagcaaacgcggtgtttgcaccttcaccagaatacatggtgtctggagcgaacatcggatggaatgcttcacgaacgtttgcaggagtaccgccagccagaggatctttaccgtatacagcacggagtgcgaacacctgaccagtagggccagtcataggctgaacaccgcaaatgtcgaatgcgatcaggttaggaatcgcacggcgaaccataccgattacagcagggccgatgttggtgattgcaccgctggatttaccagaggcaatgttggttgcgtcgtaaccgtggtcacccgcgatctctgcttccgccaggaaaccgccgaaggattcaatgattttttcgtcgcgatatactggatcagtatcagcatccttttcctgagtttccagaattgctgcaaccagttgttttttggatttggtagcgatatccggtaaaccttcctgagattccagaagatcgttccatttttccatcaattcgtttttcttagacattgtttcttaccttataagattaggaaagggctttagccgcttgtacatatttattgatcttcgatttctctgctggaggtgtattttcattcaccggaacaaagtcatctttagtggttgtctgagtagtggtactctcttcaacctgtttttccgctttagtcgctaccatttcaacgattgcggtcagtttggattcgaacttgtcggaatattccaaaccttcgatcaggttctgaaccttttcaatttgtgattcagtcagatcttttgttttttctgaaacgatggtatcgcgtttcatgttggcgatctctttagcctgagcctgattagcttcgaacaggcgtttaacttcctgctgattctcggtcagttcatcttcgagttctgcaacaacatcaacctgtgcttctgggataactacgttgtgttcaacgaacagttctttcattcccattaccagagattcgaacagatcggccttgatatcacgggatacagcttctttgttttcagagagccattcctgcgcgatgtggtcgaagtatttattcgcatcttcgtacagtttattttcgatttcgccagctttttcggcaacctgggcttcaaccagttcatcggagcgttccgcgatctgggcgatgtgggtttcagcgagtttcgcagcacctgcttttacagcttgttcgaatacagtggtgaagtttgctttcgcatcatcagaaagttcaactgattcgaaaatgctgtctaactcaactggggtatccaggttctgggcttctgccaacagttgttctttaagcatttctaagtttcctgtttgatatgatattatttatatagacttttcaaacgttcagagagttttctgaaagcgtcatcatcagcactattattctcaacaagcgttttgcttgactgagattcggtaatcggcttaacgtaagcatctggagcgcttggcccccaaacaacatcaacgcctactgccaatttaaacccttcttgtacgataccgtaaccttttccagaatcggaaagtttacccagtccgcgagaagaaacacctggaacccaacctgcgcgaattaacgccgcgagtttatccccatcaccgttatcaccttcgacaacaacagcgcgaccccaaacgtcattacctttccaccataatttttcaattaggatgcaagcattacgcggatcgacattcggtcgcggcggatgattcatttcacccagagcttgacgggtattaacctgagttctgatataatcgtttactgcttcttctaatacttttttcggatacagtcgcttattgcggttaactttttcggcctggaggaaaataccttcaatccgaagtttaccgtcttttttcgactcaccgaccgattctaaaattgaatcggaaatatccgcacaaggtaaaccccattcctcgattagcagcatatcgccgttttcattgagttgggattcattcatatttatagccctaatgcggcgcgtttacggagcgcttttttacgcttacgctgtgcgcgggttgtaatagaagggtttgcacgttttgtttttagcgcacgacgcgcaatttggcgacgttgagatttagttaaaccagttgtttgatacgcattacgttcacgggttttacggtcttttttacgttccacattaccgcgcgaatctacgtgtttaacaatgacttcatctaaactcaaaccctcgacaatggacatcatagccagggctaaatgaggttcattgaccgccaaattttcgatgatcttcacagtgccgtcatcgatccccagaacatcaacacgggctttcgcttcggttaaatggggttcgagatcttcgacgctgatttcttcgagttcgagttgcattatttacacctcttattcgtctttatcgtcgtcttttttatcagacggctttttgtctttgtcgtcgcctttatcatcgccgcctttgtcgtcgtcatcgtcatcgttgtcgtcatcgtcggtttcaccttcgatgcgtacagcttccgcgagttcaacgcgcatttcttggcgaagggcttcggtacggtcttccatgatggaatagaattgcttcttcgcttccaccagatcaccgcttttgattgcttcgataaattctttcatcaaaagttttcctcttcctcttcgggatttttgaaccgttcttctttggattcttcttcgatcagcttcgcttgttcgtcaatgtcttcatcagacattcgaagaatctctttcatgatgtatttatgggagacatatttccctactacaccttcaacctgtgacattaacgttaggcgacgttccataatctcaatatctttcacttccgcataatatgaatcttgctggaaaatgaaggaaattttgctaacgttttcttcccattcttcctctgtgatgatttttttcgcgatcaggttagtttttaacggatcggaaagcacagggctgaactgaatttgcagtgtgcggataaacttactgaatttcagttcatcacgggtgatttcgccaccaccaccaatttgcatacccccatcatcgcgaggcatacggcttaatggcacacgcagtgcttcatagagcttacggttaaaccatttgatatcatccatatcagagaagttcgcaccgcctggaagcgtgtctacttcggtgatagctttaccgtcacgacgcattaaccagtaatcttctgtcattgacaggttgttttgctggttcttaacagtacccgttttagcatcgtacacaacgcggtttttaagcccctgtgcgatgttatttacgtactgtgtcgctttgttgccacccatctgacctacatcgatgtagaacacacggcgttcaggtgcgcgggtgatacggtagatgaccatcgcatcttccagtaaacgcaattggtttgctggcttgactgcgcggtgcagatatccgataatgttgttactgcaatcttccagaccagaatgcgcatacacgatagcggagcgcgggattttaaccttctggttatgctggtagatctgcccgttgtatgtatagccatttttaggagcgctatacacgaaaaattcgcgataaccacggaatactttcacgccaccatcgagggtttcagtgatagattcgcggatcagttccatcgaacgcggatcaagttgacgcagttcgcggatacctttgctttcgtctttatgcatgattttatggaagtatatacgggaatccacataccaatcacggaacagacgcgcacccatgttatcaaaatcatagatatttagaacgttatcaaattcttctacgattttgtcctggattgccttactaaaatctgttttggcaagatccaaagtaatgatatctttgccctgttcattcacgatcgcatcgtcaataatttcagaaacagcgttttctacttctgggtaagacatgatgccgcgatatgtattgattaattgttctttgttctgaatcgccggatcttgtccagaataaaactgctggaatacgcttgcgtatttctgattagtcagatcagtttcgatttcataagcaccatcattatttttaggaggcgcgaccgaacctgtatcattttttaattgctgttcaagatctaattcgtcctcacgggcgaaattcttgaaaaagctaagtacattgccaaagcccaaaaagttcatagtaactccgaaaaataatgataggggtattgctacccctgtatttatagcctttattcccaccagtccagcgcgaaagtaacctcaaaggttgacacttcgttgttgctgtcccagtccagggtaacttcgcctacgttagtagggaaaagaccgtgaatggtatgttcggcggtaatttcatcgttacggtttttctgtttcaccgtagcggtttttttgtagttcgctggaatatcaccactaatctgatcgcccattccgtgcatcatgtttgaccatgctaccagagcgtcacgcgtattatgcgcgtcatcgttatagatcgtgattgtccagtcatcataggtacggtcaccagcaacgttgattttgcggttttggtatcctaccggaactttttcaactgtagccgctggcatggttgccgctttacacttgaatttaaagtttttgcccagatacgggatctctacttcgaacaggttcggacgtgcgaaatcaccggattcaaaggcgcgtaaaatgtcagtaagcatttttaacctcggattatttatgggggcttttcagcccccttgacgttatacggcttgcggccctaccagttcatcgaaatctgcgcccgtagacgttgctacgaagttcagagtgatgtagttgatagaacgaggcggtttcacgtagatcgttgctacaaactcgttacggtcgattacgtccggtgtgttgttcgtggtgtcgcagattacacggtaatcgtagcagccacccagcgcacgaatattagtcatgtactgacctgtatccatacggaacgaagaacgggtgaaatcgtcgttgttttcaaacagtttgtatttcgcgttatcaccgatgtctttcttgatcatgttgaacaagcgacgaacgttgatacggtcaaatggactcggtacgttagtcagtgttttatcaccgaacagaacgaagccggaaccacccgcgaaaccagttaccgggttaatctgaacctgatacattgcgtcacgatgtgctgtgcgcggttcgatagccagtttgatacagttgcggatctgaccacggttgtaacctgctggagacatccacggttgagcaacgctatcagtgtaaacacacaggccagcgatatcacctgccagcggaacccaacggttcacgtcattgtatttatcatactgatatttatagttaccatccaggaagccatagcttgaacttacgttcaggttattgtcaaccggagtaccaccactgagtttatatccagtacgccattcaatgatgttatcaaccgctgttgccagtggaatattcaccatcagagagcgcggaggcgacacaaacacagtacaatcctgacgttcatcaccgatagagataacgtgtttctggacggtagacatgatctctacagtttcaccagcacacgcaccagcaatcagcagaggtacatgcagcgcttcacgatcagcgaacatatcccaaccagtcatcagttcatcagcgcctacagtgtcgtttgaggacaaaccaccgccgaactcaaggataccggagaagcctttaggccagttcagggaagtaccgtaaacgtactgagagccaccgttagcgaaaaagtcatccatgaagatgtttacgccgtagatatctttatcggtcttctcagttgacacgatgaaggattcctgtacaatgccaccacgacgcacaacaaaagcgtactggttgtcggtctgtggcccgtaggtcattacagaacgaccgctattcttaacggaaaccccagaagggtagcctgaaatcatagcgccagaatcgtaagcagctttggagataatctccacctgaacagttgaacccagttcaccaggatacagagccacgacagacgggatctgatatttctgggtaagagtctggaatgcggttccctgaattgtttcttttgcaatatccaggttcaacagagtgatccctgaatcgctttcgatgccgtcaatcgtaatagacgcagaaacaccggaagactgagaaacaatttcggtagtccagccagtagaaatatctgggtaagtgccaatctgtttagcacgggcaacgattttttcgcttgggatgattaccgcgaggatcttgccgttactgtcaacttcggacactttaccgttttcttctacaacaacgctgttgtattttactttaattacatcgtttacagtgtagttagaaccctgtgatgcgatagttgttttgatctggttgaaaattgcgcttgcgtttttagcggcatctttatcgacaacgcgaaccacacggagatcattaccgtactgcaagaagttaacagcactcatgaaatagtcagcggtcaagttgtctggggaaccaaaatagtttaccatttcgacttcgttagaaatctgacggatctgataagctggcccccatgaaaatttaccgacaatggcagcgcgaccagttgaatttcgaacaacggtagattgtaccgatgtttctttggtttcaatacctggagattgtaaagccattatagaatttcctctaatttatataaacgaaataccgtgagaaccaaccgaaatcgtttcatcaccgcttgtaacgataaccggacataatgcgtcttcgtatagctgttcgcgttcccgtgcaaaaacttcattggctagtcttaaatcgtctttctcgcagaattcggcaaatttcatttgagttgtaagccaaccgaaacaagcaagcgacataacgaggtcatcgtgatatccttcttccgcagcccacgaaacgcctttttctgagaaagtacgaaattcgagtattgtctttttgttatttatgatcaatttatctttctcgatcaggtctttcagcgtcgaacatcccatagcttttgatcgcttagtctgtttcatacccagatcgttgtagctgtcacaaataacattctcatattccagttcggaaaacagagatttggcaactgaatgccctgtgctatttagctcaatgtaaatccatgcctcgttatacatattcagataacgtaacaggatatccggcaaaataagatgcgacgttttgtttgagtgatacaccgcaacctgttcaaatggcatcgtcgtaatgtcgatgatatgcattgcatggtaatcctgtccgcgaccttccgctggatcaagtaccgcaacatatttatgcccctctactggacgtttatactgatagaagttcgtttccgtttcatcaatatcaatccatgtgagttttgacaacttccaaccagcgatcagggttccactggttcccatgaattccgcgcagtgttcctgcaagaatgcctctttgctggagccagcgatcatcttcgcagaccacgaataaccgtcatcaaatgtaccgttgtcgccgtctgtatacaatcgctctttaaccgatgtccagatcgccgtgtaaggcacgaagccggattttccttctatagcagcgttccagatatcatagaagtggttaagcccgttaggtgtcgttgtgataaggattttcgatttacgaccagaagaaattactggctgaatcgctaaccacgcatcaacaaagttcgggataaacgcgcattcgtcgatgtagatcatcgcgaaggagttaccacgcaccgcatcgggagaagatgcaaacgcaccaattttacatttgttgtcaagttcaatagaacctttgttccattcaacaataccaggctgcaagaagtcgggcagtagttcgatcgcctgtttggtacgatccagaacttccgcagacatcgaggctttgtgagccagcacaccaacatatttatcttcgttgaaacacacgaagtgagccaggaagattgcaacaacggttgttttacccaactgacgcgacaggttacaggcaaccatacggtttttgtgcatttcgatcagcatttcgcgctgatagtcacgcaactgaaccttgattgtaccatagtcaatgtgggtgatcgcacaatatgtttcagcaaaataaacgatatcatcacgacatttcacccactccatcaacatttgttgcgtccatttagtctggatatacgcacgtttcaggtttgggttgccgttatatcgggttttcttgttgcctttatttttgtacgtggcaaagttcgaactgtccttagactgaatatcgaccttttgaatgccgttaattttcaggtagtcactgaacgttgtcggataccattttttatcgtgttcgctttgtgtccactccatccccaattcatcaattttctttttcagatatttgggatgcattaatccgatagggtgatctgattccttactcggatcgatcgtcggttccatttccatcagggtttacctctacagcttcaccattaatgaagccctctttgggttcatatgcactgccgtatttctgcatcagttccgtaggggaaccaacaaatacggttgcattctcgatattcatttcactaccaccaccgcctttttcagcacctggttttgtagtctcttccgtaatctcacgcatttctttgtgaatcttcatcaggccaatgtttgaaacgtttaactgattcatcaggcttgtgaatacctcgacgtggcgaggcgattcggagttcttcgcgttgtgtaatgcgatctgcgccatatccatgatcatctgattcatatggtgcgcagtcttacgcgcgagcgtataatcctcttccagatccggtttccggtctgctggatgtgattgaacgtcaaccagttcaagtttctcgtaaacaaccacatcctccccagactcaacgccgccagggagggaatcaatattcagcaattgctgtaaatctaatttttcatccattttcattccctcggcttaggaggttcatcaccagacgggatcggcttatcgtgcgagtacgtctgaatatattcttcgcccgtgtagtcctgcataggcaaatctaccggatcggcttgactatccacggattcaaagttatctttatctaacgggttcatgttagcgaagaaatccgtgtaaacggttctgatttcgcctttaacatcagttacaggcgggtacagataaccctgtaattcaaacataaatgaccactcaacatgacggcgttgatttgcatcgccctcgaatgtggtatccggcgcaaccgattggagactgattttgatgtctcggtcaactgtgatatcgttcttatgcagttcggtaatcttacagttgaaatgcggttgaaaatatggcaaaatctgttctgcgatttggaacatatcatcttcatatcgcgtgtaaacacccagttcgaaaatcagacgatatggcacagggttaaactgtgtgatcgtttttcgtggggttgctaactgtgtcattttttggttgaccgcgatactggttttacggattgcgttatattgcagatccaccagtgataagttcatgcgcggtaaaatcgtttccgttttagcaacgttttcctgactcaacgtgtagttaagtttgttcatggaagcgagaaacttctctttcgatgcataggtgatcggaaccttgatgtatttttcttgatcgccgcgtactcttttaacctgaacatggttaaacaattgtcccataagaacaatatagttacgcagtgagctattataccagtagccaaacaattttatactccttctataatattcaacagtttatcgtaattggatatatctgttgtttctgtatatccatccatcatatctgatttatcgactacgccacaaacaagagattgtttgatcttctgttcaatactcattgcatcaatacctttatcgaataatttttgataaaccagttcgtgtttataaacggatttatttgattgcgcacacattcttttttttggtgttctgttggttatcccaaatttcagaaattttccagatagtgattgtacgtatacgtatgctggtttgttcggattgaacccagacgttgcgcattttttacagcgatgaccttgattgagaaaagcaactatacttacatcccaattatggcctttatcgcaaaccattgatatttttgtgtgcgcatctttatacaccccaacgaaatctacgaatgtatatccaattgaatctgcaagagttttgatttcctcgattctgttttcctttgatattttcatcttaggggaacacaaataacatccgtttggacgacttttgttgacaaatggtttgatctgtttttctgttctatgtcctttactgcaaacaacataaaactttgaatattttgtgatcgctgattggtctacccatccatcaaaagatagttctaattccgcacaacgttcttttaattgatgttctctttgttctatagagatttttgcaaccatatcataaaatcctcttcgaagagggtatagacttccgcctatacccatataacgtatttatggcagacttgcaaacggtgaaccgcgtccgttgacaacatcaaaagattcgatgaattcatcaccttctctttcaaattctttgtcttcttcgtactgttcgatgttgatatcagccagcccgtcaagatttcggataggttcgagatccagttctgcatcaggttcgatatggattccttcatttcgctgcaattcaggagccagttcttcaccagtgtagatgaatttcgccaggttgattttacgctgaggacgatcaccgaactgatagaacggatcggcttctacccacgtaatttcaaacaggctattgtccataggaaaataaaccagatcccccagaacaggaataccaccatcagtttgatgtgcgaacaaacgagggttaattaccagcgtcatttcatcgtttgaactcagaccaaatttactaaagaaatctcgttgtccttcatagttggcatacgattcaatatatgcagcaattttccatgacttcgtaaatttggattctcggtcttcgcccaggatcttatcaatattcacgaagtcacgccggacgtaatacatatcaggcgatttcatctggattgattctgctgtcagtgaatcgtgtagctgttgtgtcgggttgtatttgtaccagtttacatacgggttagtgacctgatcctttaagttgcgatcaaccccttcccccgtagacaactgagcgaataaactttcatcccagttttgcattattccccctacaccataatgatcggtactgcgtcagacatagaaatcagttcatcgcgcagactttgcagtttggtttccgcttcctggatcagtcgcgtaccatcaggagcaacaccgccaggcaattgcatcccctggaatttagccagaatttgtccgttgatctctttcaccagtgcggtagagtagtcttttacccagcggttgttatatgcagacgttccgcccgtaacagttgaaccctgtcccgctcgtacaccgcctacaacgctgttatacgggttttcgtagatgtcggctatggattggtcttccactgcgttagaacccgctgtagcgtatcctgcgacgcttcctacggagctagggacatcaacgaaggaacgaaccatcgcttcaataacgataatgtcgcctttgttcacctgcccccatgcgcagaactgaccagtatcatcgttgaaccagtaatcaggcagtggagccagcaggtcttgcattgagcgttgataggacatcatctgggtaaagtagcccatatccgcgccgtatgcgttcataccgtacacactcgatgcacagcgcccacccagagagccaccagtcaaccccatcaggaaatcggtaaaccacggataaaccgctgtaccgtccattgtggtcaatgaacccatgtttgtacgcaacaccttcgtgatcgcgaagatgtgttctttgctcaagtcgaacacgttgcgcgggttatcatcacccagtgtcaaaatcagatacgttttgtttgtgccgttataatgatattctgcatacaggtctaaagcgcgttgaatgcagtcataaatctgatcttgtgtgatttcgattttgatgattggtgcgcccagacgacgaagaatttcatcctttaactgttctggattattcgtaatcatatgatcctcaaaaggggcttgcgccccttgttaaaattatgctaccgtcacagtacattcagcggaggtgatggtcgccggagaagtcgcggaatccgtaacttcaactttgtacacacccgcttctgctactgtagccaggcttgcgccagtttccccagtaacttcaaccgtatctttaaaccatttgtatgtatatggtgttttgccaccagtaacaacaacggctaaatccatattatcgcctgttgtataactcttcgttgccggaagatccgttgtaaacgccagagccggacgagtagttacagtcacagtcgcggttgctgaatcgttggtactgttcatcgcgtcagttacggttacatagtaatcacccgcatctgcgctggttgcagcagacttgacgatagaagaaccagtttcaccactcaatacagatccgtctttatgccatacgtaagtgtacggagttttaccaccgctaaacactacttccagagtcaatggatcaccatcaacaacagaaatatcgctcaagtttgtatcgaactgaggaaccgtatgtaccgcaatgtcaagttcatcagaagtaatcacggtattttcagcgtcggttacgacaactttatatacgccggaatcactcgttgtgatgttctggatcattacactcggtgaatcagtcccgatatttgcggttcctttcttccactggtacacataaggcagtttaccacctgtaacggtaacagataaagaaatatcatcaccctcgatataatcgttacgaccgaccagattttgagtaaatgacagtggaactttcttcgcttcgtatttgttatccgcttcaacttctgtgatatacggaaccagagcatcagcaacatcctggcgagaggctttattctgttccagatcgtccagacgttgttcaacgttaccaccaccgccagcttcgagagcagcaacacgcgcagtcagatcggaaatcagtttataaatccctgtttctgatcctgtagtattaacgccgatcgcagttttgttatcgcgagccgttttctgaataccatctttgaggaatggatcagaactggttgcatcaccataaacagctttacccatcgcgatattagccgcaacgagtccagttgacgtattacccacaattgcggtaacatcaaccagtgcctggtgatcgtcgcgctgtgtgttttccacattcagcagacggcctttgatgcttgttggctgggagtcagtaccgatatcggtcataacctgcgccatttcaccgcgcagaccatcatcacttgtttcaccaacgatcatattcagatcgctaatgctacgtttcattgtgctgatatcgtaacggatactacctggaacctgtgagttaccaacagcgctttccagaaggattacgcgaggcagaacaccaacaaccggatcattcatctgggtttgcagagtagtaatgttcgtttccgcagtttccatgcgggaatcaatactaccagaaccacctgagcctgtacgcccgatataagtgttgatgtttgacagttcggtattaataccagtgatatcgccaccgataccattcagacgaacatacacagattcgaaagtggctaaatgcttcggccccatttcgttacgcagatcggtaacttcatcggttaaattacctacatctgagtttacccagtcatcttccagcttagtaatacgtgcttcatggatagataccgcctgagcgttagccattaccttgtatttcacgccggagccagtagaggacggatcaacatcaccatcttcgttaaagccaggatatgcacccagttcatctttcaggaaaataatatcttttcgaatggtacgatgtttaggatcggttgacgcatcccatacaccaatttccttttcgatatcctgaattttcagggtgttgcttgctgtagttgcctgtacagcagacatatctactttcagcacgtcaacatcagcgacaactttatccagtttgtcgatcacactatcatcagagatcgccgcgaggttttcagtaatgaggttaacctgatcgataacttcgttgatttttgatgtctgggtagttgtatttgcttctaattgtaccgcgttcttttgaaccagaacaccgcatctgtttaaagaaccctcgttagtggttttggtttttgcaccatcgagagtttcgccgttaacaatccaattgatctgggtttgtgtggtgtccgcagggacaccatcaacaaacgggatctttggtaacgggttaagttttgaaatcatggattaacccctttatcgtactcgaattacgtagttgaccgcaaggtttttcattcgcgtttcatttccgccagtacctaatgctttgctgtaatcgttattcaggtgcataacacgttggtcatttttttccgcgcctttcagttcataaactgcttgactcttaggaagattaccgccgttctggtaaatcatctggagatcatgttcgtgatacgcaaacatatcagcctgatatgtaccaaaaccgcgacctgcatccacaccacgcccaccatcaaagccgcgagctacaagaccgcgcatatcaggcaagttgaaaatatcaccagaaccgccgtatgtataaccaattcgggcaaacagttctgggtttgaattgcggttcattgctcgcccgttacagataaacaagttaccaacatcggcgttaaacgctgcaagcatcatacatccgatcgggatatttgcgtcaacatctgtctttgtctggtatttattgtcagcactaatcgaaccctgatacaatgcaccaccagtaattgcactgtttttgttgctcggtactacgttagcaccagcagacaaagcagtattcgctaatccggtattgatatctgttgttaatttaaccataccgaaagtagagccggaacccttcacagcagcgagtttttgcggggtgatcgctttggtgttatcagtacccgcgtttacttctgcctgggtagcgatacggagtaaacctaaatcactttcgcttgcagtcagacgaataaacgtgtatggtgaaatcgcaaacccatcgcgaatagtacccgcgcgaacttctgcaacagttgctaactgaacaagaccaaacgaactttctgttgcgtttgcctgtaccggaaccagagcagagatcgcttgcttcactttaagcggagtcattgcggtagtgtcatcagtaccggatgttgcctgagcagttgttgacagtttcacagaaccccaaacgttttcttttgcatggcgggtgttaaacacatagttcaacgagcgcggagtaagagaaaccagatcgtttgttactgttactgattctgcatcagttgcgtaacgagtgtaaccccatacggtttgtgatgcatgagggttttgcagacggtattccagcaaagcaggagttacgatcgtctgggtatcagtacccgcatcaatcattgcctgtgtcgcaatagcagcaataccgcgcacaccaggcgcggcattaggcaaaccaacatcagtacgcgcccacggcccaatagcggctaatgcctgttgtacgttcttaaacgtgctaggccattgcgtaccagcaggatcaaatgtcacgtaaacggatttatcgcttacgtggttaattgtattgttcatttgttatcctcatgcaatacgcttgaaataataaatcggaactgctggagtaacagcaaggtcaatttcacctaactttgtccatgtaccgtaaccagatttagcctgtacgtcgattgttcctaccatcgaaattccgtattcagttttattagtaaccggatgcggaactgaatcaataaaacgaacttccagaatttccccgttgagacctttacgagtaaccaaatcgaaatatttttcatcgttgacgaattcaacgaatttgttatagactgtctcacatacggtagaggcgttcgttgtattgtcgaaaacgaacgggaaaccataaacgtgaatagtcgcctgtgtttgatctggatctgggtttgaaaccgtcccatcaaacgtaattgattctacctgttgcaccgcagaaggggggctatcttccgtcatcatgattaccccattgatcgggatctgttgagacaaagaatacaggtcatcaattgctgattgtacgttagggtaatctaccccttttcgaagctgatcgacgtttgcaccaccaatagtacgtttaccaccaatcagcggttctttcgtacccatttcatattgcaaaaagtctgcttcacgggaagggactttcgccccctcccttgttttggaaataaactgagtcatttatgctacccttatccagcggtgaacagtaatataaggcgggagcgtttttagtttatctggagtagtgttcccccgatttacttttaatacatcctcgcggtatttagtgtaacctggccctgttgcatctgggtcaacctgacagccaccaataataatgatcccgttgtcatctttaatcaacaccttatcggttgactgaatttgtggaacgttgatcggtttaatttcataaccacgttcgccaccagtaccaccagaagtgtgagttggttgaccggaaccatccagatcgttattgttcagaccaaaatcgctatccgatgcatcggttgtccaacctgcaaggaacataccttccgcgtaacgtgtccagataccaaagcccatataatcgcctgggttagcatcattatgcgcgttttcgtagattgtcccgattgggtgaataacatcaaagaacgcttgcagatccagaagacgaccgctaaatgtatccgctactttacgcgaggttttctgcgttgggttgttataatcggtatattcgatctgattaaccagcgtcacttcttcttcgttgttcaggtaaatcttatcggtgtgttctttaataccgcctacaccgtcccattccattacagtaccgatatcattgttgaaccagcgaatagttaccacatcacgggattccagaggttgagcaaatttaatgccagtaaccacggagtcaacaaaaatcagactgtaatcctgtccagaaggaacccacgcgccggagttcgcaatacagctatcttcatcataaccttctgcgccctcacaaacaaatgtcgggagatccgcatcgcctgctttaacaagctggcgaccgttcagcagcagttcgaacgagttcgggttaatcaaaattcgcggactgataccaaattcagcattagtgaacgtgcgtttgtttggtagatcaccaacccagatttcaccagggatactaacctgttctgtgtctcccgtgttatatacgcgcatggtatgcgcttcatacgtcgctcgccatgcggcaataccatccagataggtaacgaattgaagcgtgtcaccagcgttacacgggtttttaagacggatatttacaccatccagatctaccagttgtccggcgctcgcaccaggcgaaccgtaatcgctgtttgatgaattaaacccgttcttgtcgtcgatgtacagcaagttaccgcgatagtaaacttccagtgcgcggacgttgtacgagttaccagggccgaacacgttcaggaagtcagtttgtccctgagtcgcgatatacgtttctttcgcaacggttgccagatccgaagttgtgattttgtcaacctgtttgttttcaacatattcccaacgtccaggagaacaataaacaagttcaacgtccatcaggtctttgtacagttctttgtaagtcggtgagcctttgatggtatcaccgcttgcagggacgatacggacgttgtttaccgcccacttaccccatacgtcacgtaagcgaataaccttgttataatcgcttacactgcctttagggaggtttaccgtaatacggttgttgctggtattcagcgcccatgattcaccgaaaataggggtcagcgtaggcgctgtgtgcgttttccacgcacccgctgggtgcgggatactcccgtcacccagtttattatataactcggtaaagttggcgttagtcttttgaccaccacgacgcagataatcacctgcgccgtcatcaaccacgttaccgataagaatttcttgtttcatgctgcgatccctgatttaatggtgtcaaccgctttaatcgagaatttaatgcgatcctcggttttggattgtacgtttgcgtaaacaatatcactcgcaccaacagtgaacgtaagcgtgtacatttcatcttcgctatttttgagaactgcgtattcagttgaatacacgcccttagcgacacggtcaacagacaaaagaatttcagccattttattgactgtgcctgtcatattctccgcgtacacgagaattttcgccccactgaattcactataaccaaataaaggaattgcggtcggtgatgctttcagaatgagtttagtagtatctacaggcattgtttttgaaccaaacattgattcaacagaataatcccatgtagtaacggaaccttctttcttcacacaccagattttaatctgagtatatggagaggtcacgtaaagttgatcctgaacccctttgataccatcaccaacttgcggacggaatacaacaggacgatcaacagaaatactaccgttactatttatgaaatagaacccttcgccgggtttacccgatggaagaacaacagtaattggccctgttgaagtatccatatcatgcaatgaacccagttcgatcgggttgcctgaataataagttcgcggtaatttctggaaatatccggtcgcgtggagtaacattgtacccacaccatcattcgcagtcagtaaacgcacatcaccaaacgcgttgtatacgttggtgatgatttcgttaagtttaacaccgccgtcatacagcgggtcaccagttgacgggttgccgatttgccccacgtcaattaattttttaccagtttgatatgccattatggtttccttagaattcgaaaataatactgacttcttcggtctgatcaggagaacgaataatcggttgacggttttccatgtagatcatttgtcctgagtcaagttcaagctgtcctttcgtgtaatactgccccgttgcttttacttctgggtcggatggttgcgcctttttcaacagcggatttacaataacgctgatttgacggaacccacggttgccaggtaaagaggcttgcgggaagaacagggaatccatatacgcgcggaatcgcattgagtgaaccttcattcggtacaccaaatcgtacatatcaggataccatttgatcacgttatcataaccccaacgaaccggatcttcttcaagttcatcagggaacggaacaacgatatgttcatttgtacagcggttgataacaacatctggtggaattgtatacagatattcccagatatagccgtcgcccatgtcgataccgttcgcttccccgcgcggaggttcgatcgattcgtgggtcggtgtccaaatgccaccaatgcgcacacattcaactttacccgtgatactggagattgaacaagatccaatatcaggaacgtctacaacgcggtataccatccatcctttaccgtagtcagtacggttataaggcgcggagtttacaaccacgatgtcattaatgtaaaagatttttgggtttggatatcgagtatcgccccagtctttacgcggaacgattgcatcaatcatttcgcctggtactttcgtcatcccgatcatatgcgtccacatatcaacgataccatctgtatcatcgttcggataagggggagcgaattcagggtcggattcgttatccgcccattgttcggtacgcccgattgacatataaatcgagttatgatcgggggtgtccccgatcatttcgcgaaagttcatcatgttttccgtgcggaacttaccagttacgaccgcacggtagatgttttgttgagccattatgctacctttctctgagtcggtggattcggatcgcgaggattacccgcgtcgtctttcaatcgtttttccactaagttacggaactgagagtatttaaccgctgaactatcgaacagaggactttgatcaaatcgacgcgcggacggcagtacaccattcagcggtttttcatcaatgtcatattgtggcggaacatcaaacggttgtcccgctttcgggtgcgggtcgtacaatgcttcaccagttacaaggtcaaatgtctggtttccgttaccgtccagacgtgctacgcgatcaggccaatacttcggataaccgctatcgaagcgataatttcgaagaatgtcaatgatcgtttcactatgcgtcatagacaaaccggagttgatgaacaccgttagcatggtgatcccgataaagccaaagcctaccggatgcacgaatcgtaaaacgtcatccttataacgggacgctggcagattcgaacgaattttcatcacgtagtaagaacgcccacggttgaagtagtcgatcgagttgttcgccatttgcttaccacgcacaccacgcagaatagtacctgtgaagttagtcttttcagacttgacaacctgcccttcaaggaagttaccgatcacgttgtgcagcgttaccgaccaacgtaattgaccgtcatcatactggcgttcgatatacgtcacgtttgctctcgctgttggtgtgtaaatcgtccggcctacaatgtcctggttgatatttgttgaatgaaccagaatatcatattccagagtgttcgaactttcgatttctacacttacatcttcgttatacaacagtttgaacaggaatttatagcttgcttcgatgcctttcgttgagtagaaatcactacaacgagattcaaagaaacgaaccacctgatcacgcttcgttttatccaggtagatattacggcggtttacttccgaccacagatattctacgctgttcttctcacgcggatatttgttcctgatcaggttcagcagcttgttatagtaggtgttttcacccagcgaaacgaactgcaaatagtattccccgaacttctcgaaatactgctgatccagatagctttgaggcgcaaagcgcgtaatcatatggcttaaatctgggtcaatcaaaccaggtgacagatccggttgatacggtttttcgcgttcctgctgaatcagatcggcaatcaataacgtattgtctggtttccagaaaatcgttaagttgtcgcgagcgcggtaactcagttcaaagaacccgatgatttctcctgaactcttatacagcaacacaccgttcgtatacttcgtgaatccggtaaacttaatgttgttaatgtaaatcgtaacatgtccgcgatcccatacctctttgttcacacgaagtgatgacgaagggccagcactatcggttacaaggctgtaggtgattttcggatacaccaccagaggacggttatcattagtgatccatgtgcgcacagagtcgcggaagaaccagctataattcgcctcgttgtaatattcctgcgcaccaaatttccaaacagtcgggtcgtcgatatgagcgcgaatcgtcgcaaagttaatcgcaaggctggcagtatagccaggacgcaaatcatattttacagcaccgaccagtgcagggttctcgatcaacaattcaggatcgggaagtgtgcctggatatttgtagttcgctacggaaataaaaatctccgtgccgttcgttgacatattggtgtattcatgctggatataaaaacgttcttcctcggtgttcccgtacaggcgcacaaaggttttcgtgtcttcttgccattgatacacaccagcagcagcggacggaaccacgttagcgggttttgtaggatcttgcagagcggttttcacttcacccgtaacgagtgcataaagaatcccgttcatcacatccattttcttgacaacgatcttatcatttccagggacaactgtatagcttgctgtatcgaaaatcttttctccgaacgttggagaactcggatcggtgtcgatcggtgtctgtttcagcgcgatacgacgcacaacgtttttcgcaaccacataaagccagtcatcggaacatgccattgcttctgcatatttcgacacgttaccaggcagtttagcaaacgtgttgtatgagtctacgtcgaaatcaaggccagtctggttccccagtttggcaaacgtaacatcatcagcagagaatcgcacatcgtccgcagaccagcgaatatccgttgaggtgcgcccgtagaagatacgatcgtaacccagtacataggttgtgtttcggctttggtacgcaatagagcgcgatacagggtttcctacgcggtcgttaaatgctttgtagtaatgccatgtctgccctttgtcgtttgacaccttcgccatgttctgaaaacgttcaaacaggtacaataaaccgtttgacgctaccaggaaagttctgttaatgtcattacaaacgtgttcaatatgatcctggatttcgtgatagttttcttgtgtaagaattttatcgctgatctgggatacgtcagtgtaaagtggagaaaacacaaagtcttctttcatcaacgctgccattaccacatctgtattgaagttaacgtagttctgattgttctttgcgaatttttcgtttatgaatgcatcacttggcgtaaattcacgcattgttgaatatgcgtaggcgttaaggctgaacgtccataattcatctgtataaacccaatcagacggttcaaagcccttgtgcgtaaccatgacgcggaatttataaaaattgtttggttggacatcggaagaaaaccattcattcaaaaaagcgtaacccaactggaaccaggttaaatcttcatctggaatagtaacaccacctgccccgcgagtttctgccatttccacgacatagtaaaaatccatgccgacgctatcccacttcaaataaacgaagttagcagccagtttatcaacgcgcaaactggtaattgacggcgctttaatcattatgtttctccaaatttgcgttacttatatcccatatttagcaaacaaaaaacccctgccggatgacaggggttaaaattattgactgattggattcattgtcaatgttgtatattgaggacggagatcgttttcaaacacaatcagagaaccatcacgggtgaaaatgttctcttccaatggtgtaccagtcagttcgatataagcagcgctgaatcgctcggatggaacgttcaggacacccagatcgaaactaatgaaatcagtgtagtgttccacatagccgacttcgtaatatttattacgatcggtcactccaggatatttatcaaaatcggttcctgtataggctgcgatactgatatcaccgtttttgaatggcccgataacaatttttgcacgtccggttgtggtgttcatatcggttgatgcataacgcacatcatacgaatcaccagcagcgtttgtgtatttgaacccgttcgaaacaacagaacgtgatttcacctggtttaagaagtgaataccagacatcggagcgctgtaatagttatcaagttcacgcaatagctgaatagtcgcagaagaaccaatgatcgacacgtccgcgttatcaacataggttaacattttggacttactgaatgatttgttgaaaatttcaacgttatcagtataatatctgtcaacctcattgattacttgaccacgcaaccattcctctgattcaaccaacttactgatatcatacgttactttgatactttgtacgatgtacagatagttcgggtcaaggatcgacggcgtaatcgtcgcaaggttatacttcgccagatagttttgcatatcctctttttgaacagaggtcaaacgcaaccctgatttcggtttaaccgcgatgaacgcatagccaggtttttctttatcagtaaagcactgaaccgcctgaataacagaaccgaaacggtgagacaagaacgattcataatccgatgcagtaacacaacggcgttgtgtctcacgcatgataggcgcgagttcgcgaatacgttcgatatcttccggttcaccaccaccatcagcgcctacatagtccgctgaattagtcgggttctcaacaatactcgtaatgctaatgtttgtcaacgtatccacgtaaacaaagttttcagcaccgtttgcttcttcgccgttggttgaaatatattcaataacaacggttgaaccgtttgcaggtttcaagcccccgatgtaatcagcagtcagagcaccacccgcgacctgttggctggtttcaccttcaccaaagtaaacttcggtatgtccatcaacagtttcacgcatataaaaaacagttgatgcacccgttgcgtttacgatactttcgtttgtccagtcatcccattgtgcgccgttgacggtaacgcgaacctggctacggtcgatgtttggatcgcggatcaggatagtcgaaccatcaaagatgacttcggtacgtactaaacgcccctgaacgatgttcaacatcgaaacatagttattgtttttgtcacgaacgatcaccacgtcatcggatacgacgaacgggaaactgtttgtttctttcactgtaccgatgaatttcgtaccgcgtggaatacggatcgatgttgggttcagtgggtttttcgcagtgatcaggatcgaagtatttgcagcggtgcgggagtccggcatatagcccaaatcctgagcctgttgaacaacagaactacgcaatgcagcggtacgaataaacgattcgaacagtgcggtgttactcatttgctgaatgtacagtgtacagtatgataacagatccacaagtacgttcatgcgcgagccggagaaatcataatccttgaattcgtcctgacctcggagccagtttattaagtcagatttgatttcgtcaaaagtagccccgacaaagatatcggggatctgattaatttgtttctttgtagtagccattattacccctcgttatcgggtatttagtattgaaccatagggacgcaaacactaattgaaccgaatgtgatcgcgagtccgattaatgacagtaatttgtttacgtattgagttaccttacttagagcaagcgtacaaatctggttataaatcaccttgcatgtgtccttaaacgagcgggaactgtcaacaaagtttttatatagcgattgtgcgcccgtcagcgcgttctcatacgtttttaacaggtcatcgaatgcaaccccacagtaacctaagaactggttaatctgagccattacaggcagttttttgagttcagccattgccatgctgtaggtgtctttcatcccatcttgcagagtagcaatctgtgctttgattccctcatatgcggccttagtcgcattcacagcagcgttagcggcatcaagtgcagcctgataagcagcggttgttgcttccgttacaggttcccacatccagtttaggtactgatcgaacttgcgtttaatcgaatccctttcctgtgtctgtgctttcagggtgttgaatagttcttgcccctgatcatacagtgcggagatctgcgcataggatgcatcaatgaacgctttcactttcgcttgtgcttgctgatacagatccattgctgtaaaccctgggaagttaccgcccagaatcacatcaagaggtttaatctgtcgcatgatgttacggatagccagcacagcagaccaaagcgggtttggtgtttcgggaggcattgaccagatctgcatcatacgcccgtacaaatccaccagagcaacgcaaccgttttggaacatagtcaaacaccagtcaaataacgcgctacaagcgtctacaaggtcgcgagcgccagccttgacatattcaacggtgtagttgtaagaactgcctatagccccgtagattgcgtttatgacgctttcatacgtctgtgcgccggagtcaatcagagcctggaaagaatctttcagggattgaaccgaactatcaccaaacaccagatcgtaaatgttgattgcaacacccaggatcgcaacagtcgggaggaagttattgatcagactccatgccccacccacgatgttaaacgcagagctaatgatctgccggaacaccttcattgcggtttgccatgcttgctgtgacaatgccagagcacccgctgtgatttcttccatcccgatcgaaagcccgtcaaacatcgtcgcgataccagagccgtttttaatcgtacccgtcagcatatcgaaagccagcttgaacgttttacgagtctcgttccacgcggaaagcatagcatcgctgatattcgtatacgggaaccctacggtcgccggaatacagcccaatccagagcgagcagaaaacaatctggcttcactcggtagcgccccatacgttgacgggagagcagggggaaccggaggaatgctggtatctgcgttcgtgtttactgacatccctgtatatttgcactggtgcgcgggggattcgtcgtgtttcatgtacgcaatacgattaccattccagtagtaatcaatgctggtaaacgcgcctgtagtctggttgtatacctgtcggattcgcggatcgcaacggggaccggaagtcagcaagtaaccaccggagttttccaccttgtacatcgcgagttcgccagggttcttgaacagattcgcttttgatagatccgccccgtaccagtcattacccgcgagcttagtagccccgatagatgcgatataggcatcaatatccgcttgactggcgaaataataaccaatcttcgtaaccagaatgtcagtagaaacccctggggttccgtctggattcgtgggtacgtttggagagttcaccaccggaagcggatcgcttttctgtccgaaaggggaactcgtatacaggtgagttccgatcgggatgatttcggtcgcccattctaccccaacagcagggtaattttctgtgtgtccctgccagataacgcgtctgtaatatccagcggggatctcagcatcgcaaggatgctgaaaattttgcataatcccatcaatgatggtttcataatccatgatcatgtttagcctacctgtacagtaccgccagtgatcttagtcagtgcgccggaatcaatgaaagtattattcgatgctcgcatgttgatattacgtgcgccaatatccaaatcttgctcaatatcaatcagagcattttttgcggtaattgttgcatcttctgttacggcaacagttgcattctgtttaacgttagccattaaattctgattaacgtttacggttgcatctttttcaacggttaattctgcgttgcctttaatcagccccaaatattcaccttcaacggtttgatttacattaccgcgaacgaactcggtcacgttaccatcaacggtctgttgaacgttacccatattgtaaatgaacgcatcaccctcgataacaacctgtaaattacccttaacgtttaatttacggccttgcatgacgatttgataatcatcaccaacgattttaacaacacgggttccatcagggcgaatttcttcgtatgatcctgctgggtgaacacggttgtaacgttcaaagcctggtgtatcgtcgaattcctgaatgtgtccagaacgggattcgaataccatgttgtatggatattcagcagcgtatgcggatttaggttcctcgaacattacgcgagtatcaccaggaacaaaaggatcttctggatttgatgcagccaacacaacagcattgtatgcagcactcaatgaacgcccttctggatctggaacctgaacaccgtatgattcgaggttgcccgtcagcacgattttagatactcgtgaagaacgtcctggtgtctggttagcccatgttgagtttcgcagttcgttgtaagcggtttgccagtcctgacgcttcatagcagccagagcattagtaaatttggcaacaccaccaacacccatctggaagcacatgttttcgattgccatttgacgaggacggtttaacgtcacgtatacttctcgaacgtttgaagtgttgctgatcccctgccggacttttgccaaatcctgagcaaacagcgttgaaacttcttctgctgtgatcgttccattggttacttctcgaccaactgctttactgatcgcggcgttaatcttcgcagtatcacgggttttttccatgataagcaaatgcccgatcccgatagtcggataaccttcactatcaatataccattttgtgcggataccttcatcctgtttaagcatggtttcgatagtgaacccgccagtatcaggacggttatcttctgggatctcgtcaagtgggcgatcatctggattgacagctaacgaactgttagcatcacgaataatcacgctcgaagaaccgcgcccctctgcgccaccacgagccagtacgttgacatcgttacctacataacgaggatactcgccaaacgggtcacagaagcctttctgggtgtccggcttctctcggtactcacccgcaaaggttcccagtataacgccgtcctggtgccatttatcgcgccagtaaccgataacaaaactaccgcgcgtgataccagtcggggaaaaaccaacaccagaaatagcggcgctgcgaatatcctgaataggcatcatccacggcaattcctcaaccggaataccgatagtttcagatttttgtttctgtgccggatgctcaccgaatacacgcacctgaacacgccccaatagacgaggatcatcgacttcttcgaccaccccctcaaagaaaggggagtatttatttccaccgtatttcataggtttgccttttccatttccttgatataatcacttacaaacgattgaatatcagaggggttaataatcttgatggttcgttttgcttcattttgaagcaccgcatcttcataaatatctacagggactaatgttccctggtactgcaaataacgcatgttcttatcgcctttgtcataccaatgaccgggattgttcgggtcttcaaccaaattgtaataacggttgcccttaccatccatatgataaagaacctgttcaccacctgcttttgaataacgctggatagcgcattgataagccgtttcctgatcggtaatccatccgtaaaacggatcgtaattatcgttaagcatcaggataacccagtagtattgctggtttccgtatagcgtttccgctaattgttcgggtcttaatgaacctgtcagttgatatgtacgcggcttataattcctgatcacgcggttaaagtaaaaacgataatcgcggtagatatcagtagttggtgtgcctttgtaatcaactggtggaaagaacgaaaataacattgtaatttcccctatctaatgtttactatatttaggatctaaaatggctggaagacagacatacaaggggtcttttatgccccagaacatacagaaatataagggagatccgcgaaagataacgtatcgttcaagctgggaaaaatatattatgaactggcttgatagaaacccgcatgtgaaacgctggaacagtgaagaggttgtgatcccttatttcagcaacgcagacggaaagcgacggcgctatttcatggatttctatgttgaaatggataacggtgtgacctacctttgggaagtcaagccgatgaaagaaacgttgcccccaccgaagccagcgaacaacaacgttcacaacaaaaagaaatttgttgatgcgctgtatacttatgcggtaaacattgacaaatggaaagccgcgaatgcagcagcaaaacaaaagggctgggagttcaagatcatcacagaggacacgttgaaacgtgtgttcggatggaaagggcaataaataccctaaacggagggaattatgagttttatttttgagttcgagatcatcgcagaagaagacaagccaaaaccaccaccgaagcgaaagctgggtgaatgggttgaacttggtatcaaattccgacgcgcaaaattaaaaggcatgacagccaaaaagttcgcggacgaaaacgggattgcatacgcaacgttcacaaagtctatgcaccgctataagcagcagattgatgatgaaatcgaacgccgtaaagcagaaaccgaagcccgacgcaaacgtaatgactatcgtaaaaaacacgcggttgatatcgtaaacgatttccgcaacagtttgaagaaaatgactgttggtgtaaccgctgcgaaacgtcagaaagattcgaccgattggtttggtgatttcatcaaaaccagcattaagacgcacagggttgcgaaaccagcaacgggtcgcttgtatacgttcatctacgatgcgaaatacaaagacacccttccatactgggatcggttcccgctgatcattttcctgggttcaggacgttcgaaagcgggtaacttggttctgtacgggctgaacttgcactatgcgccaccgcgagcacgtcaagagtttttagaagaactcctgaaacgtggctacggatcaacagatcgactttctaacaaaaccagactgaaaatcaattggaacaacgtgaagggaatgcgcggggctgatcaaatgatcaaagcctacctgccagcccatctacgttcaccacttgcagagatcgccccaaaagattgggcgaaagcagtttggttgcctacacaggctttccagtccaaaggaaaaccatacagcgcgaagaaagtttggaacagatattaacaaaaagccccaaccgaaaggaaggggctttatttttacagggtactcacgatttccgcgagttttccaggggttgcgccaggtcgaaccttcatcgcatctttcaggtttttatcaaccatcttttctgcgtctttttcgttaaacccacgtttcaccaacaccgcaataactttttcgcgaatatctttagcggcttcgttcaaatcttctgattcagctagaaccagtttagacagaacatcacctttgtattcctgggtaaagcgtttacccgataccagacgaggtttaccagaggcatctacaaccgtaaacacggcgtattcacctgtttctttggttttggtacgtccggtatacagcaagcacatatcgttacttgggagcttgtacacctttcctttcaccaatgcttcatccagaggcagatcaatttcgaaatcttccgccaactgattatacagatccaggttttcttctgcttctttgtacagagaagcgcctttgaatttcagtggcttgtcgaatttcaggtcatcagcaggatcaccgctgtagaatgaaacagtacctttcgcccagtcaatatacgctgcctgagtcttgccagtggttttacctttcaggcggacaacacctttaccgaagtaagcgagatcgtgggagtccggcgcatacacatcgtaatcagcaccatgtgcaaaatgcaggaaaccaatctgaccttttgcagcgttaccacggtcaaccagatcaacggtcttagcaaattttttgttctgaacagattcagaaagtagttctttgaatgatttcatgttttcaatctcttttgaaagtataggtatagtatacctatttattgaatagatcaactaaaaattagatcgcgagcgaagcgagttccgtcaagcgaagcgaagacggatagttaacgattgtataaaaagtatacggaaatgtactgttttctctatatataaaatataaatattataaacagtacatcgtacataacactcacttcgttcgtgtgttcgcttcgctcacggtcttgatctaaatatctataaaatggagatcatcatgaatacaactgctatgatcctgaaccagatttcacctactaacttcatgttagatattcctgacaatgattatgtaaaagggttgaaactacaggttcagggtgttacactacctgctatcaacattccaattacggatgtcccactgaacccaatgattcgagggaagatcccaggatctgcaatggagttcgatccactgactattcgttttgctgttgatgaagaactgcgatcgtatcttggggtttacctttggatgctcggtactgtcgattttaacaccttcgattccgtgcgttggagtgaaccacaacaggcaatggctttgcatatcctggataactcgcagtcaaaaactgtagcgacatttcgcttctatggcgcttggccctccaacctcggagagcttgagcttatgtataccaatgattcggatgaagccgtatcctgtatgacgatgttcaacttcgctcacatggaaattgagatcgacggacgggtgatcgtgcctactccacggaaaacgcaaaaatgatttatggtatttgtggtaaaaagcgaacgggtaaagataccgttgctcaaatggttgtgcataacttccgtaatgttgaagttatcgcgttagccgacgaaatcaaagctatcctgaaacgttctatggaacatcacgataacacgcaattgcgagcgctggcagcgaagaacccattctatgagggtgatcgtgaagccccgctggtgatgtccaataacgatgcatacgcgctgttttctagcggtatcaaaaaattaagttctcgcgggttcttcatgagtaacgcagatgttatcgctcataaaatttgcgaagaaaacagccagccctggacgattcgccgtttgatgcaggtgttcgggactgatattgtttgtaaaatagatccgtctatatggacttcaattgctattcaaaaaatgttgaaatcctacgcggatcactttatcattaccgatgtgcgtcaaccgcacgaatataaatacctgagcaagttcgggactcgctttgtgttccttgaacgtgaaactggtattgaagataatcattcaacggagcaagggttgacacctggcttgagtgattatacaatcctaaataatggtacgttagacgatttgaaacgtaacgtgcttaatgtattcaatcttttaagagtgtaaacaatgactgaacaaaaccaaacccaacagcttcaaaacgatgtcctgatcctgaaagcccgtgtattcgacctgaacgaaatcattcagggtaaagaacaagaactggcaaatcaccgtcaactcgtaggccaaatttgcagtcttctggaaatcgacggttcgcagggtgtatcccctgatgccctggtcggcgcgatcaaagcacttctgccagcaacagcagaaaccgctggcgacgatgaagcgattgatgcatcaaaagcataattaacgcttaggcgtttaaccactggggggcgaaagcccccttttcatttggagtacacatgaaaagttttattgaagtagcgaaacccgtagttgatccggggatctatatgtgtgcgaagttcgatcaggcttcctgtgaagcgctcgcgaaggtgcaaaaacttctgggtgtagagaatcctgtttccgctgcaaagctgcatacaacgattgtgtatagccgtaagacggttgatctgttccctgcatccggtatctctgaacctgtccgactggttgacgtggagaagtgggaaacgaaatacggtaatacgatcgtgggcgttctggagtctgattatctccatagccgcttcaaagatgcaatggatgctggagcaacatacgattatgacgattacaaaccacatgtaaccctcgcgtatgattcccgcatcgaagatatcagcggagttaaaagactgttgacattgcccgtagatttgactatcatccaggaagatgctgaaccgctggatctggataagaaagtcgaagacatcacggagcacatcgaacatcgcggcgataagtgggttatactgaaccatgatcgcacgaaagaacttggtgaatatgattcgaaagaggcagcggaaaaacgtctgcgtcaaatcgaatactttaaacataatgggtgatttatgaacagagcacgattgatgtatgttatcaataacttacgcagagaagttaaccaaaatttcagtaaagcgttaagtgattggtatgtgacaaaggtttcaatgactacagatcacatcgcagaccgattcctggatcgttccgcgtcagtcaaaaaagactttgcggtctacagtgaaattcttaatagtctcgctaaacattattcgtgtaacgttctgtattacgcggtgaaagcgaaaaacgaaggtatgcaggaagtcattgcatatcgccggatcaatggcaaagtgtttgcctgtgcgttcaccgtccagatgttcgaaaacatggatgattcggttgctcacgaaaaaccagtgattgctgtacgattccgaaccgttatccctgagtacacgttgagcctgaacacgcgaaacgcgatccatgtgaactacatcgcacccaaaatcaagttcgagtatgacggctacagacgcgttatgtcacgcctggatcgcctgattgcttcaaaagattgtcctcctcaactgcatatgttgaaaaatatttgaaaaaagcccttgcattcgtgcaggggcttttgttatattaggggtgtcgaaacaaaggagacaatcatgaaactttactggctggtgttctcaaacgggtttgtaatgaaaggcactgttcactgtgcgaaaacttattgcaaatggaatgaatgctctttccgtatcctgagcgttgcatcttctcaacctgtaggggattactaatgactggtgataagtgggttgataaaactttgttgttgacagtaatctactttctggtaaaatacctggtgtagacaaaggagggagttatgagaaacttactgaatatcgcggaaatcttttgctatggtgtcgctgtgtatgtcctgtttaacggtgacggcgcgggatactggatcatgttcggtggtggattgttcctctctttcatcaaaaaattttttaagtgagaaatatactatgcgctcaaatgtaccgaaaaacctgtataccgttattgacgctggttcgattcgtattgctgatgtaatggcactagtcgaacgcttcgatcgttcaacgacgctggggcaactgctgagtatggttaaatcccagtacccgcacaaatgcccgaaatgcgagggtaaagggttcgaagttgtgcgtgtcaacacgtatccttctggcttgccggattctggctgggttgatcagatggaagatttcaacgttacctgtgatatctgtaacgggcaaggcttcaccaaagaacgccttatcgcaaaacctgtcaaagtggaatatgtacccgcatgaaaaacaaaatctatgctcatatgtctgagcacacaacggttcgtgttatcttggtagatgggccaatcgctcaagtagaaaccaacgataaacctttctcgttgcctttacaaaccagtgtcggtactttcgatgaagttatcgaagaattgacaaaacacgccattgtttatctgtgggaagcgcaaagttatccatacccaactcctacaagtccggcgtcagaagataacgtaaaaattcgttggggatatattgaatgaaaattaccgatctcgtaaaagcggctaatgcgctggtgacaagcgaacattacgccaactactgcgagcaataccctgttcccctggaacgcgcaattactcaatccggttatgacggtatcagtaccgtaaccgttgaaaacctgaaaacgttcatcgtgtttgcgaacacgttctggatgtacttacccgataatgtcggaattcgccagcctactttcttcacgctgtgtatgttctgcgaaacttatctccctgaatgcgatgactacgaagaacattatggggaataagatatcaatgggtaacaaagtatccctgatgcagtttgataaaaagctggggtttgcattctctcacggattcgccccagacgcggaaaccatgtttaaaatggcttttggcatcgatccggctaccctcgatcaagaggtgttgtcagacatcaacaaaactggtacgctgtattatgcccgtctgccaaatccagaaaacggcattcagtaccaatcgactctcgaaaaactcaaaactgaactgaaagaaataggtgaattatgacttctacagctattcaacaacaaaccattgatcatgatgctgaattcgcacaactgatcaaagaacataacgcttttgcggcttctcgcgtcaatgaagaaagcgaacagacccgccgatccctctgggttgccatttaccgcgaagtgttcagcgagaaatccgctaacaaacacactcaggcagttgatgcagcagataaagcgctggcagcatacgatcgtaagttcggagcacagtaatggaacggtctgctggtattctcttcctgaataacggcagcgttttaatgggccacgcgaccgaaacgcctcattgggacatcccaaaggggcatatcgaaaaaggcgaagaacctattcacgctgcgatccgtgagtgcttcgaagaaaccggagttcttgttgaaccgcacgaactggaaagcctcggaagactggattataccagtaaaaaagagctttacttattcgtgtataaaggcaataattaccccgaagccgataaatgcttctgtgcgtcaacgttcgtgaagaacgggcgaaccatcacagaaatggacggtttcaaatatgttccgtatagccagatccgcgatcatgcgcgtaagactatgggacaacttctatctaaacttgtgggatatacatcatgaaagcaacaacttttcaaatctgtcaaatgatccttctggctaccgcaacccgcgccgctgaacctatcgcgtatcagtcatggggtgattcattcaccgtgaaaaatattcgcgatctgcctggacgcctttacgcttcccctgatttcgaacccgtcgatccgaatgatttgacgctggaagaaatgaaaaatctgggcttccgtaagtgggaagacgattcaaagatgatgctgatccctctgtatctgttgccatacctgaaagacggtttcagcgctatcagtatcagcggcaagaaattcgaattccgcgctggtgaatcagataacgatcatcgtatggggctgctttcgttcggagcactgcctaatgagtcacgttgatttcaacaccttatctcaattggggttgatctggaaaatcaataaagatatcctacatcccctggggctggcgttgacgcgtgatcctgaaactggcgtatcggttggtgcgctggtttccgatgatggtgtctggtcgttcagcgaaaaatcagactttgagaacatagcaaagctgaataaactttatgctttacaggccgaaggaaagctgttagagttcttacaacaaaacgtgaaagagtgattatattatgaatggtgaacgtgtaattgtcattggcaagtcgaagcataaagctaacgcgaagggtgatcacttgatcatcaacaccgatcgcggtgactggtacggtgcaacgaaagtaacgagtggttatgcaaccatcgttgaaaaagatgcagttcgtcccgcaaccgctgctgatcctggttactatggaacccgcgaagagttcgaaagtgaaaaggatcaggagatcgcagaactgaaaaccaaagttcacaacgcgcgggtgtatgcggtgatttgccttaccgttgcggctatcaatactggtttgctgggttgggtggtgaatcatgtctaaagatgatattccggttcataaccgacttcgggaactccgaacttttcgtagtcgcgatcatgcgatcatggttggaagttatctcaactggtggaagcataatgatctggatctgaatccatcttatcagcgcccctacgtgtggacgcagaaagaacaagatgcgtttctgactaccttaatgacggggttcccttgtggtgtcatcgcgatcgcggttgatagccagttcaatgaaactcactgggtagaagtcatcgacggtaaacaacgcctgacgacgattatcaaattttacgaaggtgaaattggtcttcctatgccggacggttcccgtttattctggcatgaactaccccgacacgaacagcgaacctttgaaaatatgtcattacctgcactggggctggatgaatgcaccaaaaaggatcgtctggaattcttcatcaaactgaacttcgcgggtgtgcctcaatcacaagagcatatgaaccgcgtccttgaaatgtataaggctgcaaaatgaacaaagacgaagaactgaacattgattcagtagaaccaaatcagtttatcatcggtaaagaagatcatgaactgttacaagcggttaaaaacttgctgacgtatgctcatatccgcgtaccgaatggcgataacgcaaaactggaaatcgcgtgtgctggttacggttacaccgctaccgctgataaaatcattagctattcagcatccagaacccgtgaactggttcattaccgcgataaattgagtgaagaaatccatcaaactcaggtaattgtagatcagttgccagaaaaattcgattaaagtgaaaaaagcccttgcagtaatgcaggggctttgttatattacacacatcgaaacgaaacagagaaaggaaaacatcatgaacatgaacaaaaacattgccgctgtagttggttgtgaagtttctaacgcagaacgttatgacaacggtttctctttctgtgttccgactgaactcgatgcgtacaaagccgcttacaaataccgcactatgccgatggtaaacgttacttacgcgccgaacatcgaaatgtggctggttcaggtttacaacaaagtatgaacttccacgaacgcaaggccgcacgaaccgattattacatgcggttcgtgtatggctggaaattacggaaatgtgttgcatgtaacggatcggggcgatatgatagcgaccgatctccgaaatgcagttcatgtaatggaaccggaaaagaacgctttaaacctgtgaggaatatattatgcaacatgtgaatctcaacccaaaaatggaaaagtatctgaatcgccgtcatgacaaccaggcgcaaagggatcaggaacgcgcgatcaacattgaaacggctaaactccttacccagatgttccgtaagtttcctagcaaattcccatgcaattctatgcattcaagtaactgtatcagcgtagaactggctgataagcgttgtatcagggttaacctggcttacgggttatccgaagacggatataacctggtgatgggctggacatcaatgattggcaacttcgttgaacagaacaatattgagttcaatatgatgcgctctgatttgttccagtgtccggtcgattcaatcaatatcggtagcctttacgctatccttcgcgcacaatatgatttgtggagtacaaaatgaaagtaacaagtgaaaaacttgaagaaattgaaaaatcagcccgttcgatttcttctatgatgggtagtaagtggactctcgttgaaaatatgagcatccagggaaatcaggaatatggtttcaggggcaaagagtataaacgcgcgttctcatatggtgttccatatggcgacagccctacacagattaaaagctgggaagagggtctcggaaaatatctggaaaccgtagatccgcaaacggttctggatctggttagcgatctgtcactcgcgcttcgagacaagcaaaaagcagaatcagaagccgcgcactggaaagcaaatcacgaatgcgaagtatcccgcgcccgtgtcctcaaagagcgccctgatatgcctctggagcgcgtcaacgcatacaaccgtatggttgagttagaagaggaaaacaaagccttaaaacagcgtatagcgagcctggaggatgtcaatcaaacccgcatgatgttgcagatgattcagggtatggtgattgatacccaaaacatgaaccgcgaacaactgcgctactggcaaacacatttccgcaatcctaacgggtggtaatatgttcggacgaaaacgagaatgtaaacatgttgctaccggatggatgcggggaactccttacgcctggatgcatcattccgtaaccgatgggatcgggcgtatacatggcgatatgtatgcaacatgcgacaagtgcggggagaagtttttgatgtgtaagatacacgttgaccacgcgatccgtgagctggcaaaacatccaatcacccgcgccgaaatccttcgaatcctcgaagaaacaaaatagcactttttgtttaaaaagccccttgcaaccgccaggggcttttgttatattacacacatcgaaacgaaacagacaaaaaggaaatcatcatgaaacttgttcgcgaagcaatcaaactgggtaacgaatacaacggcaaatggtacttcatcatttatgacgacaatgcagaaaaactggaaaaagttgaagatgcattacgtgcgatggaaactggtgcttctgttggtggtaaagtgatgacctgggaaaactactgcgacggttgcccttgctacaacgatggtttcggttctggtttctgggttgatgttgaagatgttccagcgttcaaagccgcatggaaaatcgctaagaaaatggcataattagcacgaattgctaaaactccataaccctgatctgttattgtacacacatcgaaacgaaggaggaaattatggaaatcatctacaaaagccggaactacaaaaaagaagatgttgcagcagtttacatcaagtaccggaacgtgaaatgtgagtacagtggggcatggggttatgaaatcgttgttgaagaagtcaacgccgacaacaaaaccatttgcagtttcaccactaataccgatagccctctgttcactactgaacagcttgaacaggcttatgaactgcgcaaccaggcttttaacgcggtacgtatcaaatgagattccgtccttatatcgagttccttcgcggtatcagtgagatcctgaaccgcgaaatcaaacccagtccgttagctgttgagctttaccgactggatgcaacccccgaagatgcagcgaaagattacggagatcagttataatgttaacttttgaagagtacaaagcacagcgtgatcagttaagcaactggcacagagagatcggcagggaattgagcgcttaccctaaaaatgaaatgggtatgacgatcgaatcaatccgtaatacgccggaatacaaagcgaaacgtgctttgtgtaacaaagttttccaacagcttcgcatccttaacgggaagtacatcaaaacctacaaaaaagaactggctgacgaacgtaaactgaaacggagtgtaaaatgatgcaacacgaactcaaaacagagattgacaaacgtactttcctggaaaagaataaaacggtaacgctgatgcattactccaccaaaaacggttcgagtgagttctggcgcgttaacattgacagcaaagagaaacaccagtcgataccgttcgacaatgaaagccttgctcgcgctgtcttccaatcccacgttaaattttgagaattatattatgaaatctgtcgatatcgttaccagcatcaaagcgccgtccctgttcatctatcaacacggcaatatgcgcttcgctcgctcgaagttctacaactataatttcaacgttgatactggtgaattcgctcgctggggtgcaacatattcccacgatccagaatacgcaccattccccgaaattctcgatatcgagatcactaccaaatgcaacgggccagcgggtaaactctgcgggttctgctacaagtccaataacccgaacgggttcaacatggatcttgccaacttcaaaaaaatcatcgacaaaatgccctggctgactcaatgcgcactcggtgctgatgcacaggggcaaacaaaccctgatatgttcgatatgatggcgtatgcgcgttctaaaggcattgtgccgaaccttaccattgctgatgtatcaaaagacgttgcagcgcgtttagcggcggttgctggggctgttgcggtatcggtttataaacacgctggctttgatgtcgctttcgactcggtagcgaacctgacagaagccggacaacagcaaatcaacctgcatttcatggttagctcgaaaacctatgatgacgcgtttaacgtggttgatgccgtgaagaatgatccgcgcctgaaacaagtaaacgcgatcgtgttcctgggactgaaacaaaagggacgcggtaagaactgggacaccgttacccgcgaacaatataaaaaacttgttgaatattgcctcgattctggtgtaggatttggattcgatagctgttcagcccccgctttcgttgaagcgatggagggacacccgaacttcgaacagtacaagcaatacgccgaagactgtgaagcaacgatgtttagctcttacattaatgaacgtggtcagttcttcccttgctcgtttaccgaacgttgggttgaaggtggctgggaagaaggtctggatgttctggaagccgaagattttgtgaaggatatctgggaacacccgaaaacaaaacagttccgtaaagaactgacgggcaacaaggatcataacggttgccgtaactgtccggcttatgcggtatgtggtaaagatatgcgcgtacacaaagcccctgaaaccgatgtatatgcagtggagttgaaataatgttaatcgtatctcgtattaaatcatacgttcgtgatcgtgatattctggatgtgtcgcctatggttggtgaaactgttaccgtaagaaactatccggtgaatctggatcacgtaacctggatcgaagatgatgcaacaatcgttgttgaagggaagagacacccagcaatcacttttcacctgatctgttcaaccccgattacctgggctggatatgaaaacaaagaacagcgtgataacgctatccatgcgattgagcgtagaatgcagtttgcggagatcacattctgatgatttatcaatcccataatgattcaacgatgcgaatggttccggtatctattgacattccaacaaaaccgcgtacactggaatcgttgattgaaaaatactctggaatggttatttgtccttctaccgcacaggtggcaatggcagaacgcgatgaaattgtatttgaatgtgatgcgaaaggctatcacaccgttgaagatatgcagatgattgaatatctctggggaatccgaaacgctgtagtacatcacatactcaccgctgaaaagaaagccgaagccgtgagagaagttgaactgcgcgaagagatccgttataatcggatgtctgcacaggaaaaggatgaagcatatgaagtgtaccgccgtagtcgatgaattaatgagcgcgtttaaaacgcgtcgtacagatgggcgtattaaagatccgaagtcaatcgcgatcatcgaacggtacgcgatgaagttaagcgaacaggaattcacgccaaaggcgctcaatagcctgatggttctgaaactgctgatcgcttcgggtgacgatatgccgcacgatgaaaacagtgctgaatcattccaaaaggcttatcgttcatggggagtgatttactcccgctcgctgggttcgtatgactcggttatgtggaacctgatgcacctggatcgtttgatctgggaagtgctcgaagaagagggtattgtatgaaaattcgggtagttgaagttcatacgcctggatgggttcctgaaagaacatacaagttagagaaacgagtatttgggtttttctgggttccattgacttttaaatctggtattcatactatccaatacgatggaagaaccccagaagaagcgctggaattattcaggctaagaaccgaaaagaatttaaccgttgttaaggaaattgattatgaaactcgatcgtgaattaagtatggctatccgtactattgaaatgatacttgataaactgagtgcggaagaagagttttgtgtaagcgatatcgaagcggatttagttgaatggcgtggtgcgctttacgaagcgacaaagggcaacgatcctctgttcgatgaatatgatgtgtacaacgtcaaggtatggaacactgaataccgtttcaagtggcctggcgatgcttacgggcatattcaaaccatttacgtaactggtggtatggtgtttgcgaccagtgttggggctagtgaacttccgatcaatcccgatagtaaagtaacgacaccgaacccattcggacatactaccgtttgtttgggtgtagcggaggacttctccccgttctattcaggctggatcgaagccagcaaaactaaccttaaaagagtataaattatgtggaaaattgttgtgtgtattttgatggttgtcgttgttgtgttcttgcagtcaagctgtactgacgagaaagaggcacagcgtaccctggaagcacagggttatacgaacatccagttcacgggttacaagtggtttgcatgttctgaaaaagacacatactcaaccggattcgaagcaactggtgtgaacggcaagcagatcaaaggatctgtgtgctctggaatatttttcaaaaatagcacaattcgtttcgaataactgttgacactaatccccgttgtgataatatctctctcgtagacaacaaaacagataaacaaggggattaaaatgaacttactgaacgaaatgctggaaatggttgaagcgaacaaagaagcaatgaaagcgaaagaaggttgggtagttgttactgactgctacaaaccgcaaagctggcttcctgtgttcctcaataaagatggtaacgaagaacacggcttctatgatgctgcaatcttcgaaaccgctgaacaggcttgcgatttctggtcttacctgagcggtgacaagcctttcaccaaatacggtgtttgccagtgcaaagacatttaatcccagccccgaaaggggcttttttgtaggtgaaatatgaccaaagcagaaagaattatcaaccatcttcaaaccggattcccgtaccagggagatttacagcgcgatatcatcgaactgttatcccagcatgacgggatggaagcggagataaaggaattgactcaccctgacgtgaacgtattcgcttcactgatggatgatgtgatcgctatcgactcggacgaactgatctgcatcgagacaacgaacccagaagataagacgatcctgaaacaagcgtatgagcggatcgagggattacacgatcgcctgttcacgttaactttcccaaataaaaacgatagaccttgttgacatcaaaacagattgtggtaatctgtatatgaaaactaattgtgaggaatacattatgaaaagtgcttttgaaaaacgtgctctcaagaaagatgtgaaacctggtgcgatcatgtatgaagtgttctgcgtgaacggcgaaaaagcggaaatgggtagcaagatgattgttactggcttccctcgtatgcatcgcggtattgggctgtttgcaaaatgcatcaccctgtacaaagactgggactgtcacacagaattctctcttgacgatcgtagtatgaatgggcgcaacggatataacttccatgcgttcttcctgaccaaagaggatgcacaggcttacattgatgaagtcaatgaagaccgtcttcctcctgatatgaaagagcgaaaagaagaacagatgaaacgtaaacgtgaatttgacgaatgtttcggttatctctattacgatgattattaatcgttgcgcctcttaaaccgtaaataccctgtgtagcccatagggtattttcataaagaggtatgtatgtttaaatttagtcagaaaagcctgaacaacctgcaaggcgtgaagccggaactggttaaggtggtaaaacgtgctctggaactctcgcctgttgatttcggtgtccgcgaaggtctgcgcaccgtagagcaacagcgcgaaaacgtccgcaagggtgtttcccagaccatgaactcaaaacacatcactggtgatgctgtggatctgtatcctagcgttctccctgctggctggcagactaacccgaaagtgtggttgcctgtcctgaatgcagtgaaacaagccgctgatgaacagggcgtaaaactgcgttacggtatcaactggaagaacgatccaaaccttccgattgaaacgaaatttatcgacgcaccacacgttgaacttgcataaggcgacaacatgatttcacaattctatgttgacgctgtaaagcagtcacgtaacctgcacctggcgcgaatcattgatgggcgctgggggcaagaatgcggcggggtgtctatcttcgaaactgcgctggatatgggtcggatgtcgggtaaaaccaaagcggctttcgatatcatcaagcagtctaaagggacactgaatatctatgttgcaccgacaaagcagatgggtatttgtgctgcggtagaacatggactggataagggcgctgattcgtctttcattctgtcgaaacgtcaagatctgacttccattttccgtggacaaacgatcaagtatcaggcaatcaacctgattttcgatgaatgtgacacgacgatcgacgaacggtttgaactggcaaaaacgctgaccttgtgtatgcgttcaagtcatcttcatccgttcccatatatccatattatccgtttgggtatgtaattgcagtgcgcggggtgcgaatccgcgtaccccgcaattaacaggaaaacttctatgaaatatgttctagataccaacgttttaatctcgaacccatattcaatcttctcattcgttgaggcgggtactgaaatcattatcacctctgcgacaatggaagaactggatcacctgaaaagcaaagagcgaaccgctcatgaagcacgattggcgatccgcctcctgtctaaagtaatcctggggcagaagtacgaagcaattacccaaacaggggtttcgttgaacctgacgaacccagcactgccggaaagcgtgaaactccgtatcgttgattatatcggtttagaagagttcccgcttgataaacaagatgcgcgaattatcgctacctgtatgcaggaaaacgcaaccctgatcacccgcgacattaacatgctgttgatcgcgatgtctaagggatgtcctgttgaacaatacacgggcgatgactcgctgaaagatagcgatgtgttgtattctgggtatgtcgatatccctggattctgggatgatgtcgaggtgttgggatatgttggcgaagtagcccaaataagctattcctcgcttcctgacggcgattattacccgaaccaatacattctatcggatggtgaacttgtagggcgtgtagtggctgctggagagtatcagcttgaactcttaccaatcaaacacgaatccgcgatgaagcgtaagctgatgaaaacaattcagcctcgcgatgcactgcaagcgtcattcattgatgcaattatggataaaaataccgatgtggtgaccatcatgggcgctgctggttcaggtaaaacaatgctggctgttgctggtgcaatgcacctggttaacgccggacactttgcaaacctgatgtatgttaaatcggatagtcctctgtcgggcgaaatcgggttcttacctggtactctgggcgaaaaactgcgtcctgctgtggaaccatgtattacgagcctgaacattctgtttaaggatcaaccggaagttgacaaatacgtagaagggctgctggagaaaaacgttgtccagttccctagcctgtattacttccgtgggcgctcaatcgggcatcctgatccgggtaaaggttcggttctgattgttgatgaatgtcaaaacttgagcaatcacgaaatcaaatccatcatttcccgttgcggtgagaacacccttctgatactatgcgggaacattaaacagattgacaacccgcgcaatactgctgttaacaacggctttgtgtatgcggttgaaaaacttaaagagtacggtcattcaagtcatgtgatcctggataccgtatatcgtgggcgactggctgcattcgtcgaagagaacttttaatcaagggggcttcggcccccttttttcgtgaggtatacatgatcaacgttattatcagtccaaagctaattaccgtttgcgctaattgcaaaagtgggttagagtatgaactgtctgatgtacagaagagaaccgaagcgttttataatggtttcttcaatgcagcagattacatcgtgaaaaaacatatcgtctgcccgaaatgcggtagcgaagtgaaactattcttgtgaggttattatggttcaagttgtgagtattaccccaaaacaaactacctgtcgttgtggtgctgtcctgtcatacactgcgcaggatgtcaaagaaaaggtatctactgattacactggcggtcgtgatgtgtatcgtgtgattcggtgtccagtctgtgataaggatgtagtagtatgaaacgcgaagaacgttatgcagtgcttaaatatgcggatattgatgccgcgttaagtgatagcgacaaactgcttctctctgcggtagtgaataaaattgatcgctatcgtaaagagcaaggcaaagaacccataaaaggggttgttgtcgagcatgattggcctgaatatgaacaggtctggaagaagatccaaactcgcgttgaccgtgaagataacaaccgcaagttcgaaacgatgctggacaacaaagaacgtctgggttatttcttcgtggttgagactcaccaggggaaattcctgatcaccagtgacgcacacagcccgaatcgtttgaaagattacagcggatacaaatatcgcgccatgttcagccctgattgcgggttcgacaacagcgaaatctttacgactggctggagtgttcactttaaacatgtggttcaggtatcgtttgatgaaatcgtagctctgtacgatccgaacgcttcgatttcaaactataacattgctgaattcatcgagaaaaaactgaccgaagcaaaacagcgtaaaatcgttgcataaataataagacgagggtatcatagccctctcttgttacaaataggtattacaatgaagaaaattatctttgctgccagcattttcttatgctctttttctggcaacgcggcgactgatccgttaggagagtttatccaaacactcccttctgtgaagtcaacattaccgctacaacaagcaacagtaatgaagaaagccccagccaatgcccccagctatgttaaggaattggacgaaattacaccaaagcagaaaaaggttttggagtatgctttcaggatcggtaacgaatacgatcgaaaaactgcaaagccagttgaatcggaaacatcgaaacgtttgggatatcatttagcggctattgcctggatcgagtctcgcgcatgtgagaacgtagggaaaggcaaaaagaatcatcatgcttatggttgttttcaagtaacagcccgtagcgcgtccgcacgaatggataaatcatattccaaacgcgtagtaatcaataagctcgaaacccttcggggtggttccaagtacgcacttcacgaactggaatactggcttgattaccacaaaggcgacttgaaaaaggcgctggcgagttacaacgcggggttcaagtattcaaagaaagaagcccgtgattatgctcgcatggttaaccataccgcgaagctgttagaagaaaaacgcattatctgataaaaagcccttgcaatttcgcaggggcttttttattatgtgtgtaccaactattgaggattaaattatgagcacatcacatcgagttattaccagtcacccgactatcatcaagccgaacatgctgcacatcattcagggtgtgttagatgaactgaacaaagatccaaaggttaaagtggaaaccatcacggtcgatcgtcatcgcatggaatctttcagcatttacttcgcatatggtgaagaaaaacgcaaactgtttatctgtgaaagtcacgatacatatcttgacgttggcaacaacacaattcatagcggcggtgtttacttcaacctgaacgtgtggggtagcaacaaagagatcatggatatcgtgaaagcgggtattcgtaagcacgtcccgaatgacgttagcatttacgaatgtgttaatgatgcaattgaagatcgctttgtgcgcgtaggggcttaacatggaaactaaactgacaccggaacagcagttagcaattattgatgaacgtatcgacgaaatccgagcgattgtaaaaccctatcaggaaaagctgaacgggttgctgaaagcccgtcaggaggtcaaagacgagatcgatcacaaaaccgcttcccgtgtccgcgcgatgactccaaaacaacgcattgagttctacatcaattccccgaacagcggacatgaaattttccgtgatgcgactaagttcttccaggatatggggcttgcgatcgatgggtataacccagaaaccaatcagcatattctccgtattgcgatgaatgaggatcgcagtaacctcgaatcagttctgaaatcgcttcaacgcgtgaagccatatgtgaagccgatcggcggtaaattactgttcgatatcttcgaacatacatgttcacagttcaatacgtactggttagcatttgacgttgcagaagaacgctggatgtgtttcactggctggagcctgaaacgcaatcaaaagccagaatttgaaagcgatagtttgcgatcagtgcttgcgtatgtctgtgaaacccattattatacccctatcgaaaacgattcatactaaggtaaaacgatgaaaaaacttgcgctgttactcactctgtttgctggctttgctcatgctgatgatcgactggctgaactctgcaataatcgtgacattaaagacgttgcggtatgtgaacaggtgattgccgaacaactggacgcggcttatgtgtggggcgaagaaaacgcgcacctcttcaagcgtcagaagttggttaaactgcatgagtttttacagtctgaaccaatgatgaacctctgtaccaatgcgccaaataaggaacgttgtgaaaaactccgtacttacctggttgatgaatatgttgctggcataggattatactgatgatgggattagtgatcttttacgggtgtgtgattgctgctgcaatcattatatggtattacgttaaaaagccaaacgaaagctcgttccctgtatatgatgacgagttggaagcctggcaaagatgggacgacgaatttaaatgaacacaggttatatcttaatgtgtgttgtggttgtgatcgcggggctggctgtgctggcttaccgccactatacaggtgatgaaaatgattattaaagaaatcaaagggaacgctgtagagttgttcctgaaacgaaaagtacacttgattcatgggtgtaactgttattgcaacatgggcgcgggtattgctaaagaagtgaagcaaaaaatccctggtgcgttcaaaattgatgcactgactatgaaaggcgatcagcggaagttaggcactaactccatctacatgacggaagaaggtcagattgtcttcaatgcctacactcagtttaaattctggggtactggcccacaagtggattatgatgcaatccggtcatgctttgtgagcgccgtagaacgcgccagtgcgtttcccgaaaaattgcctatcattacccctcttatcggtgcggggcttgctgggggcgattggttgcgtattagcgctattattgacgagtgtacgggagattacccgatcatcgttgttcacttcgatccatcggttgatccacgtaaggcggacttatcatgattgaagcaaataaagaaaagctctatagcaaaatagagaagtttgcgagcgctcgtgaccgtttccttgatggtgacgcgaaagcatcacaggaagcgctggattggtgggatgatatcgttagctttgtggatgatctggttgatgccggacgtaaagaggcgagagaatgagaccgcaagaacaaaagctgttaaaacataaactgaaacaactgggcgaagcgtatcaggattatgccgaagatgacgatcctgattcacgcaactacaatcaatcctgtattgacgacattacggcggatattctggatttcgttgaaaatgaaatcaatgatgcggttcgtgatgcggtagcagtggagcgagctaatcatgattgatcctatcaaagcaggtcgggcgatcaagaaagctaacaaacggatcgccgcaatcaaaggacaacgcgccgcactggtgaaaacctgtgaagcgctggcgcagtccatgaaagcgaacaaaatcaacatcacacagcgtaaaacggtggttgacattctttgtcttgttgatgaaggactggataaagaaatgggcgaactgaaaagcaaaatcaacatgtggtatcttgatatccataaagcacaagatagcgaaatgggcggttataatcatgactgacaaaatcaaagctaaagcaatgaaggtgattgcgacatacggaacactccgttggtgtaacgcgcaggtgtgcgggtgtatgggttgtgcaaatcatactatgacgaaagaagagtatgatattgctatccagatgccggaaatcaaagagcatcttgcgcgacgtaacaaaaaactcatgggtaacggatggtttacaattggctaaactgtattatcactatgcatcaatgaacgctggaaagagtgcgcgactgttgacggacgcgcacaattacaaagaacgcggtatgcgtgttgtaatctataagccagcaatcgacacccgcacatcaaacacagtgagttcgcgtatcgggctgaacgaaaagtgtgaattgattgcgcctgatatggatctgttctgggacattcagcgccggaataaaattgcttgcatcttcgttgacgaggcgcaattcctttcgaagaaaaatgttttcgatctatgtcgcgttgttgatgaactcgaaatccctgtaatggcttacggtctgcgtactgatttccagttgaatctgttcgagggttcttactggttgttggcctgggcagacgagatccgagaactgcggggaatgtgtcactgtgggcgtaaagcaactacggttgcacgtatcgacgcacaaggcaacttcgtaaccgaaggggcgcaggttgagatcggagccgaagacaaatacgtttcgctctgtcgcaaacattatcacgaaaaacttcttgataatgttggtctgaactgttaaggtgtattcagacaaacaaaggagaacactatgagccgtacttaccgtaagaaatatgttccagtccgtgataagtcctccatcgaacagatcgaagagacaaaagcattttcagagtattatgcacagcacggggaaagtcctgatggtttacgttggtatacaaccaactggaaacacaaatcaggttgcgcatatatccggttcgataaaaacctgaatcgcgacggtaacaaagctcatcgtgatatctccgcgatgctttcaatcgctgtgaaaaagattgattcgaaagtacgcgctaaaatgcgtcaggaattacgccggatgaaagctggcgtaattggatgggatgaaaatatcgagaacgcaaataagatccgcgcttttgagcgtagcttatgctggtatgagataacttgatgtatttttagactaattttacataaggggcgattcgccccttttttgctataaatatatacaggaacggatctattgttgatccgtaagtacgtagagaattgcttatgaacattaaacgcatatctaaagcgctgatgtttggtttgttaatcttgtctccgtcatcacatgctgatgataggtcagtagtagccaaagagttcgattactatatcaatgcggcgctacaggtatatcttgacaccatccctcccagcgtaaataccagtgaactattctataattacatggaacgaaaatggcagcagaagcaatgtaaatccgaacccgaatgtaaacgtttagggctacgggttgcaagtgaattcgccgctattcatcgttcataagggatgaagatgcagacgtttaacgaagtaacagaacgcgataccgcgagtaaaattgatgcctttattggcacttgcttaatgtctgtaacctatatgcacagcgcacattttgcgactggttcatattcacagcataaagcatttgaagggttttacgaagatatgcaggatttggttgataaattcaccgaaatccatataggcattactggtcgatacaaacccgtattaaaaacagaaaatgtgcttgacacggtcgcgtatctccgtaaaatagccgatgaagccaacgaaatctatgattcagtagatagttcattgaagaacgtcctggacgagatcaaaggcttgtgctatcaaacgatttacaagctgacaaaactttcttaaaaagagtttgacaagcgaaaaagtgatgatagaataactatcgaattgaaacataaacccaatggaaataatgatgaacttaaacactatcgtaaacaacccgaagaaaaccactctgatcgctctgggcgtaatcgccgctctgtggctggttccgaactcgtacactatcgttcaggatggtacggtaaaaactcaaaccttcatgggtaaagtttcaccgaagcctgttctgcctggcttccacctggtaaacccactggctgatttcgaggtgttcaacaccaaagacatcgcaatgaagtttgacaaattgcaggttccgtcccaggataaattcaaatccactgtggatatgaccgtgatgttgcagttcgatggtaacaaagccccgatcaaccgtatcaacgcgggtaatcaggatcaggcgcttgataagtacgtgaccgaaaaacttctgtctaccgtccgtgagttcggtaaatctgtaccgaaagcacaggatctgtataacgcagaagttcaaagccagctacagatcgcaattcagcaggaagttgaagagtatgcccgtccttacggctacaccgtgaaacaggtattcttgcaggacatcgacctgccggaagcgattaagaaacaggttgaaaacacaaaaattcgtgaagaacaggtgaacgcagaaaaagcagaactggcacgtaaagagcaaatcgctcaacaggcagttgttcaggcaattgccgataaagaagcccgtagcaatgctgcacaggctaacgagcgtgatgctgatgcccgtctgtatgcggctaagaaagaagccgaagcgaacgccgtgttgcagcgtaccattacaccagaaatgattcgctggaaagaacttgacgttcagatgaaacgcgcagagaaataccagggcggtgttccacataccgtaatgggtgcgggttacgatggacaagtgattttcgattctcgtaaataaggttttaaagcccccactctgggggcttgactcctaaaacgagaatactataatgaacataaaacagatcatccttactatcttcatttcgctattcttcggctttattggcggttttcttggtgtattggtgattgcgtctgttttatgattaacctttaaacgtggagcacgttatgaaacaatttgataaagctgtcgtaattggcagattccaacccttccataatggtcatgcagcaatggtgcgtaaagcactcgaagaagcaaaaaccgtttacatccttttgggttcagcttacgcttaccctaacgttttaaaccctctgacagcgcgtgagcgtcaaacgatgatcttctcatggttaaacgctaacttcccgatcgaagatgttgttcgtgttcagtttgaacacattccagattatctttacaacgaagagaaatggaaaacctctgttcgtactgctatcagggaaaccaaaggcgacaaaatcgctatctacggttacgaaaaagatgcgggttcatactggcttaaagcgttcggatggacacacgtacctgttgatcctgttcgggttgacggcaaggatctatcagcaaccgatctgcgtccgattattttcaaccacaaaaacggatgggataagaaactgctgcgctttgttcctcaaacaaccgtcgattatatcgacaaatggatgatggaagacacgttctggcgtttattctacgaatacgagaaatgggaaagcgaattggagaaattcaaaaactacccataccccgacgcgctgaactgctgcacgggtgatagtgtggttgtgtgtaacaatcacctgctggtaattcgtcgtaagttcgccccaggtaaagacgcgttagcccttcctggcggacacaaaaactcaaatgaaacgttcctggattgtgcgatccgtgaactgctcgaagaggtgcggatcaaagttcctgaaaaggttatccgtggttcaatccgtaattcgatgctgttcgatcatccgaaacgttccgtatacttctcaaaaccgactgtggcgcagtacatcaagttagaacctaacaatgatggaagtctgccccgtattatgggcggttctgacgatgcgttagacgcgttctggatgcctatgcacgaagtcaaacaaaatcgtggtgagttcttcgatgaccactatcagattatcgtagcctttacgggactctgataaaaagattaaaaagcccttgcgttcgcgtgagggcttttgttatattaggggcatcgaaacgaaggaggtaattatgagcaagaaatcagaagtagccgaaatcaaaaaacttgatgatggtaaaatcgcggtacgttggaaaggcaatcgcaagttcaatgtgattgaagatcccgaagtcgctgctttcctggtgttcatgattacccagaaagatacattcgttcctgatccaaacaatataaggctggcggattaatgaaacatccttactgtttagtaacccgtcctatctgcgcgggtggtttacctgtcaactgctggcagttgattcaaacaggtgacgcgttcctgaataagcgcggtgataaagtgtttgtctatggcgtggattccatcgaaaatgaaacgatggtgatcaccgacgagaaaacaaaagaaaaatatacgttgacttctgatcacgattgccgtaactttaacgtgtactggaaatctaatgaagactttgaaggaattaaatcatgaaagtagcaacccttagcggtatctctgatgtaaaatgtcgcatggcgctggaacctggacatcgtgtaggaattaaacacacgggttctgtaggtacaaagaattacaccttgcaatcagttgcgcgtgataaaaatgatatggtttatgtgtttgttactgaacctatgtcaagtagcattcgtcaaacgctggtgatgaaactgggaaccaaagaacccgcaatgctgatcggtggaactgtagagcctgttactgttgcgagcatcgcgcataaaggtattgaatgcgccgtagacggtaacggtaaactgtccttcgaagggactaaacgccaacccgtcgatcgtccggttgttgttggagacatcttcacgtcagaacgccgtgaataccatgttgaatacatcgcacaagatggttctctggtttgtcgcatgtactcccgtaagagcgcagacgataacaaatacatgggattaaccgtcattgatggacgtgacgcgatcctgctggattccctgaatgttaaaattaagtttgcatactcatgattcacacaattagcgttattatgggtgatgtcgtaaacatcaacgggcacgattactacgtagcggaaatcaatacaaagggtaatcgtgagatcctggaactggacattgtaaggccgtccgaagggcaatcccttacgatcgaagtggttcataacacgaacacaggggaagacgtagtgaagccagttctggcacgtcttccggtgttctactgtgaaaagtcaaaacgttggaaaatgaaatgatagatttaactgatgtgaaagtgggtgataccctgtttgatcctggtattcgtcgatacagtcatcacaaaaccccacgacctcgcaccttgtatgtgatcaaggttgcccgtcaatacctgtatgcgtcggaagatccaaatatcaccgatattaaagatttccgtgttgagcgacttgatcgaaaaacaggtagcgctaatgactggaataatcatacacagggttatcatagcgaagacgaatacaaagaacatttgtaccgtatcgaacttactgataaaatcaaagacgcgttcggtcgtggacatgtaacgcgtgtaccaaatatcactaccgctgaactgcgcggtatcgcaaaaaccctgggggttgaattttgaaaactgtaatggaaaccgtgttcggttctcacctgtacggactgaacacaccgacaagcgacaaagactataaagggatctttctcccgcacccgcgcgatattctcctggggaaagccccgaagactattgacaccagcacaggcgataaaagctctaaaaacaccgtagacgacgttgaccgtcagttgtatagtctgactaagttcattagtcttgcgtgtgatggtgataccgtagcgctcgatatgcttcacgcttcggatgacaagctgatcgttaactctcaaatctggcagtatatccgcgctaaccgctggcgtttttacaccactgaactaactggcttgttcggttatgttcgtaagcaagccgcgaaatatggtgtgaagggttcccgactggctgcattgcgcgaagttgttgatgtactgaaagaaaccgaaacgatcggtggtattcaggaattcacgccagatatgaaacgctatacgcgtgaagtgaaagtgtctgacatcaaggatcgtttccctacaaacgagttctgccgattcgttaccgacacgacaatgaaatctggttgtcaggacttctatgaagtgctggggcgtaaattccagttcacgatcaaagccgatgaaatgcgcaagtcagtgtataaactctgggatgaatacggagaacgcgcacgacaagcagaagccaacaacgggatcgactggaaagcattaagtcacgcgttgcgcggtggtatgcagttgatccagatttacaaagatggtgatatcgtttatcctctgcctgatagcgcattcctgaaactggttaaagctggcggcgtaccgttcgcaaccgtacaggaaaaactggaagaagtcatgggtgaagtcgaacgccttgcagcgatttcaacatatccgaaagaagttgatcgcgaattctggaacgatttcatcgaacgcgtatacagcgatcatgttgtggggtattacaaatgatgtatcctaaattgtccggcgctgaaattgatgttctgtataaactttacggatacgcaactaaagtgctagacttagatttcgatgacgtacccagcaaatcagggcgtgatgccctgattcaaaaaggttacgctcgaagggtaacgggttatcacgataattcgaaagcatggttgctgattaccccactggggattgacgcataccgacacggtattaaaacggagtggcactaatgactgatgttattttgaacgttaaagatgttgtactgggcgataccaaaaacccagacgcagttacactggaacaggctgttgttcagatcatgcgcgatagcctccgactggaagttactgaacgcaccgaaagcaattacacgggcgggattgatggtcgccagttgtacgaagatagcaaacacgttaatgtaaccctatgggcggacattgacgaaaactcatacaaaatcgacgagattgattttgacgtatgaaaataattgacctctgcgctggtgtgggcggggttcgattaggatttgataaggcgttcggcggtgtcgaatgccttttaacgtctgaaatcgacaagttcgcacagcaaacatatatcgaaaactggggcgatgataacctacagggtgatctattcgccattgatgaaaacaaagtgccggatcatgatatcctgctggcggggttcccgtgtcaggcgttcagtaaagccggattgaaactgggcttcgatgatgtacgcggtacggtgttctttgaaatcctccgcattatacgcgctaaaaagccccgtgtgttgttctttgagaacgtgcctgaactgctaacccatgacaaggggaagacgttcagaacgatttacgggcttctggaggccgaaggatacaacgtattctatcaacgcctgaacacaaaggatttcggactaccacaaagacgggaacgcgtgtttattgtctgcttcctggatgatgtattcttttcatttcctgttcccccgcgtacacctacacgcgtaggcgacatcctcgaagatgctgatgattcattcaccctctcagataacgcatggaaaggctttagagagcgtaaggaacgaaataaggcaaacggtaagggtttcggttatcaggccgtcacaagcgattctgcgcacactgggacgataacagcgcagtattacaaagacggtgttcaatgtctggtattgcaggacgggaagaaccccagacgattaaccccgcgtgaatgtttccgcttgcagggcttcccagattcgtttattattccatcgagtaagaaacaggcatacaaacaagcgggtaactccgtttccgtgccagttatcgaggcaatagcaaaacagataaggaaagtattatgagaaatcaacctgaaatcccgatcgataccgttgttgaatggcattacaaccactgggaaaatgatgaatggtctgccagccagggcgtattgaagtaccagaaaggcaacttcatcctgattgaactcgaaggtaagccaaccgtgctggacggtaaagatttggtaatgcgtccgtacaaagaaagaccggaaacaaaattctttaaaaaagtgtttgcatccggtagttgatagtgataccttagctttaccgaaacaaaggagacacaaaatggctaacatgactaaagcgttattccagaagaaagtaaaagcggttaaagaacttgggttcactccggctttgatgactaatggcaaaactctgatcattcgcttcgtgaatgcttacgatgaagttgtgtgggaaaccgtttgtgtcgcctcttgttatgacgttttgaacagacaagagaagaaatatcttgcatggtttaacgaagtgtaatatattggccttgttgaaacgaaactgaaaaggaacataccatgacttttaatgacctgtttaacggatgtactggcgctggtgcgaaattcaatctcctgaaagattacccgctgggttctaatccaggttacgtgatggttgaagtgcgtaacggtgaatactacaacgtgttcatgtgggatcgttctttctcttactgctggttcggtgcgaaatacaaaccagattacatcctggaacaaatcgaaacagtgaaagcgaaaaaccctgaactgtacgctttcgcagagtctatccgtggtgtgttcggacactgattaatcaagccccgaaaggggcttttttcgtgaggaagttattatgatctatactgttgaatgtcttgttgattgtgagcctggtaatctgatttgcgcatcggatactattctggactgtatcgacgcagtgaacaatcacgaaaccttcccgtatgttgccgatgatctcgaattcatcgcatggaaagacggtaagaaagttgcggttgctgtattggtggggaacagagtaggcgatacaataggcgctaacggttatgaaccgaaccctgtgacctacgaagaagttattggtaaaatggtgatcgaatgaaaaataaaaacgccgaacgcggggagaataccaacgaaatgttcttcattcgttgcaatcgtaagcccctcaaacgcgggtatgacgacatcgacgaagccctgagcaagtttaacgaaatcatccgttcatccgtctaccgtagcggggaacatcctggcgacctgtgggaactggtagcaaaagatccttacagtaacatcgtcctgaaatccgaaacaaagggtaaagtatcatgaaaatttatactgttgaaagtttaagcgaagattactatacatttagtgatttggtcggttctaccgtatcgctggaacgtgcgattgaaatggctaaaccttttgactgggtgagtatcactgaatgcgacggctttactggcgaacgtctgcgcatagtaacactgagcaacgaaaaagccattgcgaacgcaaccaaagaaaacttacaatttgaggatgtaaaatgaaaatccgttctggttttgtgagcaatagttcatcaagtagtttcatcgtccggttcccgaaagatccgactaatatcgacaacctgcgcgaaatgatgggcgattgcgtccctgattgtggttactacgatccgccattgacagcggaagaagtggtcaatcacgttcatcgtgacttaggcggtcatctgggtaatagctttgaatcgttctacgacgataagcgctatgactgggaaaccgaagaaagcgcggaaaaccgttaccgttcaaatcctcaaattgcgcttgcgtatgacgggcgagactggtacgatctggacacagaagagaaagacgctctgatcaaaatgtggttgtatgaagaatacaacacgaagttcggcaatcaggacggcgtgtttatctttgaattcacgtactccgatgaatgcggcccgatcggaactcaactggaacatggaaacatcttccgtaaccttgaacacacatcaaagagtcatcactgatggataataaactgaaaacagaagtttgtgttgttatgcctcgctatgcattaggggagtcgatcccctttagccaggatcgccccgcaccgtttgatgtattttctttgcgaaaatatcttgaacgatttgaactgaacgagtatactctccaaatcgttcgggtatggaatccggtaatgtatgcgcttgcgtttgacgttgctgaatccaaactcactacgatggatgaatacgttgaactcctggcgcgtaagttcgggtgtgatcgtacagtcgaagcagtaagcaataaagttaacgaaattttagaaaaattcaaatacgagaaaatttaaatgtcaatcacaaatatcgaattcaaaaacgctgtatcgaagccaaccccgacaaaccacgttttcgtgtgtgacgtatccggttcaatgtacaacgaactgcctaagatccgtaaacacctgaaagcaaacctggcgagtctggttaaacaggatgacaccgtttcgatcctgtacttctccagcaaaggcgattacggcacggtgttccgtggtgagaaggttagcaatgtctctgacctgtctaacatctgcgcggctatcgaccgttacctgaaacctacgggttgtactggctttgttgagccgttgaatctggctgcggaaatcgctaccgatctgcaatctgaaaacggcaacctgaacagcctgatcttcctgacagacggttatgataactgctggcgtaccgatgatattctgaaagcgtgtgcggttctgccactgactttcaacagtatcgcgttcctggaatacggttattatgtaaaccgtcctctgctggaaaaaatggcagaagcaaccaacgcattgcacaaattcgttgaaggtttcgacgcatacgaaccagcatttaacgaaatcatcaccgcgcagacttccgcgcgtatcgaagtcaaagttgctgatgctacccatgcgatctacctggacgaagggcgcgtgtatgtcctgaacgctgcaaacggtgttgtgctggttccagaacacatcaaaaacatctgggcgctgggtgaaaacgcgattaatgatgttgacggattcgatccgaacatcgccagcgaacagcaagttctgtatgtcgtgctttatcatgcactgcacacaatgaaccctgatctggcatggaaagtgcttcaaaagctgggtgatgtccgtctgatcaaagcgtatgacaactgctttaccaaacaggactactccaacgcgaaagacctgattgcacaggctgttgtagatccatcacagcgtttcgttgatggtattgattacaacatggttccagacgaaaacgcgttcactctggttgatgcgctcgaactgctggcacaaactgacacagtgatcgacctgtcttctgagcactgggcgtataaccgcacaggccgtcagactgtacagaaagaagatgatacactggatcaactgaccgaacagatcgcaaacgctgcaaccccagaagaacgtaaagcactggcggcgcaaatggtagcgcatgaagtctggacaccgaaatttacccaaaccacaaccaaagtatcggttaaacatctggtgggtaacagttcccgtccgaacatttccatcaacacggatctggaagggtatgtgactatcccagaaagcaaacagaaagaattcggtctgccggaaaaagtcgaaactaagcaggtgcgtaacttcaccatcgttaaagatggtatcgtgaacgttaaagttctgccgctggaaaccgatattccgacactgaaaaaccttcgtgcttctggcctgactatcaagccgctggaaaaaatcggtgatgatcgtatgtcggttctggtagactttacctctctgcctctggttaaccgtggcatgactcgcgggttaagcggtaaagagttcgtgactgataacgtgcgtctggaaatcctgaaaggccgtcagaaggttatgaagttcttccgtgacaacgcgatcggactgcgcaacgcagaagggctgaaacagcgctttggtgaggctgcgggtgaatggctgtctgaacagggtattcgtgattacgggttctctccgaaggttgagcgcacagaatcgactgatgtttacatgtcgaaagaactgaacgtgaaaatcaagggtgtttcctcccttcctgctgtagcggctaccgtcgcgaaacgtgacgaaggtaagaagaaactgaacaacggcgacctgattatcctgtgggcttacgatcaggtgaaatctgaactggatgcgcttgacaaagatcaggtagtcgagtatcttgataagcagacaaaggcaacgattcaggaagtccgtaaactgaatgcccgtttaagtcgcgtaatgtacggtgttgtagtagcccatgcatggttcgcggatctggacttcgaagaaaccaaagtttctatcgctgcaaaagatattcttccgaaagaagataatattccatccgatttctggaaagtctgggaaaccacatcattcgaatgtgaaatcgtcctggaagaaaaagaagtcaaaatctaacaatgaccgcccccgaaagggggcatattgaggaaaataatatgtcacgtaacgtattctggggtgaagttgtaaaaggcgatatcctgtacctgtccgaaccacaagcctatcgtgaaaacaacgaaaagaaccacgcatacgcgcctatgctgccggatttcgtggttgttgatgatgtatttgtcggtgaaaatggctggcagattgatttagtcggattcccttacaaaaagggtgcaatccttctcgaactggaagatcatcatttcttcgcccatgttggcaacatcgaagatcatggtgatttcgatatcgaagatatccgcgaaaagccgtatgtgttcagcaactactacaaggtcggtggacacctgcgcagtgataacaaaactgttctgtatctggatggtattctgtctgggatgcataatttcagcattgagaagccaggcaacagcgcagaactctaccgcttgtttggaaagtacgatcgccagaatggtaaactgttaccgtcagaaatggcttatatcatcaatcgtctgatcatgggacttcacaaaacattcctgattcactatgatggtgatgtagaacaggcgatgactactgtgattgacatcctgaaagcaaaatctcgtgaaatggataccctgccaaaatgacattattcttcatcattgcattaggtgtgtttattctgggagccacgatcgcatttatggcgttcgataaacgcgaatatcaactggcggtcatcgggcttatagtagcttgtatcccgctggtgttgtcatacaacctgtatcatgagaaaatcgcggagaacgcgaaatatgaggcaagacgatgaagattcgttctgggttcgtgagcaatagctcaagcagtagtttcattatcgggatcggacttgtccgccctggtaaagaacaggaagttgcaaagatttacggtgagtcaaacgttgaatctctgatggatatgtttgatgatactcgtcctcgctggggttcgcctcaaatacacgatgacggtacaatcacactggaagcgttcggatgtaatagcgtcgaaataacccgcatttgggacaagctgaaagaactgaatctggatgatgttaaaatcgttcacttcaatgagcgcggcgacgaaccggaatacgacgatgaaaccggaagttataactatgactggtatgacgacgcggacgcattcgggccggaactcgaaaagaaatacaatctcctgagagataaccgcgaactgttcattgaaggtgatgttcgttgcggtggtggttatgacggctaaacgattggtgatctgttaccgctgtttgcatgtgtatgatcacaacacagcgaagcgaacagcaacaaagcgcttgcgcgttaaagaggcggaatgtcctctctgtaaatgtaaaatctgtttggggtaatccatgataacgatagtatactgggaagaactggaaagcgaattcagtgatgaagctggggaaatggctgctgtagcgggtgaatctgaaatgcttacagctaccgaaagcatggatgatgcatttgatcgcatcaagaaacaccagaaagaaaacgaaggtcgggatattcagtacatgctatcgttctggctggatggtgaaatcttctgtcatgctgctattgctgaggatactccggtcgatatgtgtcgtgaagaaatcgtgaagtacgtcaaatcttttatgcattaactcaaaaagcccttgcgttcgcgtgagggctttgttatattacacatatcgaaacggaacagccaaaaggaacgagaacatgaaagctaaaatggtgaagttcgtaaaagactggagaaaaggcgcagtaatcggtgagagctacgtaatcgtagacatcgaaagcaacctgctcgaaggtgcgaacgttttagaagttcctcgttacggtatggttgaagccgctgataaagcaaaagaactgaacggttacgttctccacatcatcgaagcaattgagaaggaattagcatgaacagcgtttatctgattgaagaaaccattatccagccaaacggcggagtgtatgaaaagaatatcgtgtgtgctgccctgaatgaacaagaggcagatcacaaagtgaaatatttaaatgaaaatgctgttgtatgtcagacgtattccggttatagtgttgcatatgcttggaaagcggttagtttagaaacccaaccatcttggttaatcaacctgaaaaaataaggggcttatcatgaaaatgaattacgttcgcggcggtatcatggcactgttactgaaaggtgtttctcgtagtgagaatcgtatgggtatggggccgatgggtaaagtctggtctgtctatattggcggtgactgtatcggttacatcggcaatgatggattgagccgcgtttacctggctatctcaagcgggggtcgtgaagtcgaatgtggtaatttcatgcaagcacttgcgcagttcattgatactgcgatcactcagattgaaaaacagggctgcatcgaacgccgttacgcaaacaagatcggaatgattgaatattccaacttctgcttcgaagtcgaagaagtgcgttatgatacgatggacgaagtatacgaatatgtgcttcgtggtgaggaagtgattaagtcctataacgggacgaaggttatcaataaccgctctttcatcaccccgttcgaattgcgatatcaacagctaatgggctggatcgtgatggaataagaaaagcccctttcggggctttttgttatgaggatgatagctggagtttgattctttctacttcttccggttcatcaatgatgctgtagtaaatcgtcacggtgattgcgttttcgtcatactgcggaatcacttcaacatccagattgtaaacacggggttcgtatgcgcggatcgcggagacaatcgaagtccttactgcttccgctgttagcgggttcatgttctcgaaaatctgttccccgatctcacaaccaaagttgctatcgaaaggccgtgtgcctttttgtgttgttacgataccgatcagactattctttaccgctgccgcccctttcgaggcggttacgtcattgttccagtcttttgttaagttgggatcgatatcgctatacagtaagcgaaggttaacacccattttatccaaccacctttagaaacgcctctaagcctctcagtgcaacgatatgctcgtagccacacgaacaccttaccggaatgtttgcaacgattgctggcttatccagagcgctatttattgatttaaagaccggatagtcgatactatccagaacggcttctttctctgactctttacagtcatcccataagatttgttcaccgtcgatgactacaaacttaatcagttcgggtaactcttcctttccggtgcggtgtggttcgactgaaatcttgatctcattgccgtacagcttttcttcgtattcatccaccatgatatgatgacgattgagcacaaacttaatcagttccccgcattcagggcatttgatttggagatctacagtctctttgttgatactgtcgaacagagccataatgtaaacataatcgcgctgatgcttgaacacatcaccttcaataatgaagttatccgtgtcatcaagatcgccaatggttaacgggcgataagtcacattatattttgggatatgtcggggtgtatgtttacgcatttgcattctcttttcgtttcaagtcttccgccagcaatgcaacgtaaattgaacgttccatcgggcttccattcattataggttcaatctgtacggtattcttatttaacaaatagttggttttgaagaactcattcagttctgatttgttgaacaggattttgtacagtgtcaataagtcgctgaactcaatatcacgcacggtaacatgacaggacttgcgtaacagtttaacgatattttccatatcttcaatagacaccagatccaggatcgcgttctttgtgtcctcgtctaatgcattccattcgtatctttcgccgtcctgcttgacatactggatacattcaaggaataattgttcactgttgttacgatgtttcgggaatttgaatcccagagtaagcgaatcatcaagggcatattcattttgcaaaacgtaatcagttacatgcatgaatgcttctgattgtccgttgcttcctttgattcggatcttgattgcgttcttaccgaacgatacacaatacaccttagtgaaaatgttttcctgttcggtgcgggaataacccggatacataatatctaaaatttcatccagcatttcttgctgttctgtgagcgtcttcccttccatgtccgcgcttgtgagtaagaaactcaactgatcgcgcacggtaaacatagggaatcgcttcactccaccagggagttttacgcggattatgtcaatcattttaacctcaaaaggggctttcgccccttattgtccagtaaccacaccacgaacggcaattgctgccccttcgataagtgattgtttgaatccgtcccaaccttctttatctgcttcaacaagccagcctgttttataggcaaagtcaacagtgaatgtccagatttcgttattgctttcataactcagttctgggttgctgactttaacaggcaaacacttctggaatacatacgtgctgtgcgggacaccatcgcgattgtgtaagtttacctggatcgcgcttgatacttcatcaatgaatgcgaactggcctgagacatcatcacgaatagctgacaaccattcgttgaatactttcaggttacgcgcttctgaatccacacggaacgttagcgataattcgccattctccggtcgggtgaatcggatctggggtacaccgccattatacacgtattcataacccagtgttttaccaggcaactgaacaccaacgatgctcaaccccatattatacatcattttgtcacggaattctgttagcatctgtccgtaaacactatcaccaaacagggaagtaattaaacgagggcttaacgcccccatgattttactgaaacctgttttgttcagggacataatagctttatcaaccgtatagctgaatagcttgcttacgccccctgtaatagcgttcatgaactcgttcgggttattcgcgttaatggaactcatagtaccatcaattaaagtatcgcggatactcccgatcgtgctgtcgagaatgcgtgatgctggactggttgcgaatacaacactaaacaggttgcttcgctggaagtctctatttgccattcctgacaaaaattcatctacgctatagaacattgttcccccttaatactgcgtatcaaaaatcgaatcctgacgcatatcgatcagttccataaactgaatttcgatttcaactgcgatcggggtgttcggtgattctctcaacgtatttacaatgttgtccattgtacgcccgaaacgaacgctggtaatacctgctggcccgaacgtggaatgagggaaccgcaaactgtcacctgtctggaagtcacgaataaaccacacaggaggcgatttaataacttcaacgttcgatacgaagtcaacaatctgatccccgatgctgccgttgaaatcgcttgctgtcgtctggtttgttgatggtgcaaaaacgtttgcaaccttcgaagcactggaattatacgcttgtttaaccagtccggctaattctgctggagtaccgcccgaagtagtaccataacccagcaccgtgaacaggtaatagattttaatcagttccagcaggtcataacggctttcgataacgaatgtattgtaatacatctttgtgcgcttatcagagccttgaaacgctgctttcgtaccgatgtcgattgcttccctacggtctgccagaataccaccagaaacggattctacagcgccccagataacgtttgataccgcacgggataaacctttagcaacaatactatcggttgcatcctgataacggtgtgagttcacttcgttatcgttcaggcttcgcggtaaaagtatttgacaaatggggttaagtgtacccatagtacgggtattcaaaacctgtttgtatcgaacgttcccagtgttagcactaaggatctgttgcgcgttctgtgctgcctgacgtaatgagcggtagttgtctttactgcctggtgcaagtccacccgtgaaatcatatgctgtgaacagcaagccgttattatacaggcttgatgcattataagcgttatcaatacctgctgcacgttgggaaggaaattccgctgttacgatcggttgagtcaacgcgtttttagttgttgcagcacccccagaggggatgccagcatttttgatttcagcaaatgattgtacagtgtcttgcaatactgtaattttcatttaaatttcctttaagctaatgcaatcaatggtttacggtcagttcgttgtactgaatgctgaaccgtgttgtttactgttttgttgttgacctgaacgctgttaggcgttgtaggctgaacaggggctttcactgcttccggttgcttgtcaatacttgcactcgtttccggtactgtggtgatcttttcctgccagcgggagatcatatcacgatagcggtctttgtcgtcctcattcagcttgttcgaattgtttttctcttcaagcgattctatgagtttttccattacctttttatcgttgcccgtcagattgtctttgttcaggatttcatcaccctgatcgaattcattatccgctttaggtttcgctttcgcttgcgcggcttcgatctgtttggtttcgtccacgcgcttacggttagcggtattctctttatcaacctcagcctgtaacagtgcggggttttcctgcaatgctttcagttctttcttcttctcttcggtgatcttttcttcaatagccacacgatcgcgcatctgttccaattgcttagacaatgctttctgtgcgtctgtttgctgtccgaaactatatgagaatgcgccctgggtagccttaacctgttcgacaaccttagaacgtgcctcaaccactttatcattctgatcctggatctcctgctgtttcagcagaatcagatcatcgggatcaatttcaagaccgtatttttgtttgtcgcgcagtgctgatactttcattccgcgtccggcgttggtaatcgtttcagatccggtatattcacccagagcgtaaatcagattaccgataccttccgtgattgcggttttgatggtatcgcccagaaccttaaacggttcaaggaacaagtttttcagcgattcgcccaaattactcatatcgaagttttgcagaccttcgttgattttctcagcaagggttttgatattcccgaagtatgaaccaaacaaatctttcgaggcttcaccctctgcaagaatatcctggaaccacttctgaacaaccttactcagtacgtcgatcgcaaatacgatactaccgataatcagagtccattttgcaaacttcgccagcgcttcgagagaataaccgataaagcgagccagaagaccggatgtattatccttgattgcacccagcaaagacaatactttcttgctgaatttcttctcgtctttatccttatcgcggatcttcttcttgtcccgatcgacctccggttcctcttccggtactggttcaggttccggcgcgggggctggtttcttttcagcgagttcgataaacttggtgattgcttctgcaatcgttccggtgtatgtttcgattttcgcaaatgggttatgctggttcgatacactgacggagttatcaacactggttgtgctgttgtctgttaatgatggtggacgcgctggcccaacaaaatcgggcaactgttcagcaagtggttgctgatcctgttcgtattgttcctggaagccagcgaatttctctttgaaacgatcctcaaaggatttcacgctgtctttgatgtccagtgtattcagcgcggtttcaagggtattatcattgatatcctttaactcacgcatcgaatctttatctaacgttgcctggatcttacgaacagtcggttgcgcctgtggttttggtggattctgcatccggcgacgttgttcttcgttaaaatatggattgctagccattatcattcaccgatgatgttaagccctttaatggttttcccctcatgcacaatatagacttcctggagtacgccacgttttacatcgtcatattcataacgatacaggcagttaattaattgaatacggttttcgtccgtcagttcgatcggcttcccgttgtcatacgcttctttaagcagtaatgccagatcatccagcattagggtcggtttgttgaagaccaatcgaaggttatcaaaagtatgttcatacttagcttcgctgattttcatatcatccagattaataccgatctctttcagtatcgccattgccttatcgtcattatgataatgcaggtgaatcaaaaggaattcggtttctgctgcggttaattcgcgcggttgaatctctttgatgatatactcaagcaactgcattgggtctttcattgctttaatctgggtgaaatgacgataacccagacgggggatcgtaacctgttcaccagtaggcaacgtgactactttatttttgctgttcttgatgtttaaacgcgtaaccataaatttatcaagtgtgtttttcttctctttcatgatcgcctcaagtatcccgatatttactatttagtaaatagaatataaagggaggatgtctaatgtccagtaaagttataaaccgcgtcgtgtcggttaaattatatccaacatatgaaaagttcgctgataacgtctatcttgaattgttacctgcccttgtctcaatgagtgagaaaaccatcattaacggtacttctgaaacattgatgcagatctatgataaccagttaatctatcagttgacagaaaaaccgattattcaggtatccttccagtataacgaaacgttagaacagcattactacggtgttctgtattcaaacgtcgaaaccgatgatatgaaccgctctatactgcgcctaaacctttctccggtgcatacggtgtttcgtcgtaagttttcccgttcgttcagtaacaacgccgtacagacgattacagagtgcatgacggcactgtataacgatatgaagttgatcacgccgcatatcgacgcatcaaacgtgcgtattcctccggcttgcctgagcgggacgtatgaaaccgtgtttgattacatccgtgacaacgggcagagcgtagattcgtctgacttctgttatttgtgggaagatggttccggtatctttatgaaaagcaatacggagatcctcgcacaaaccccgttaaaggcttacaagttcaacgtaagtaacccgtttttaggtgacgctttggtattcacgaaaggtgaatacattacccataaggataacactaccctgttaggggatgcaagtttctttagtttctcgatgacggataaaaaactgtatagtgatatccttgcgagtaccgatattgaaaacgcatggatcaccatgaacaggaacgcggtatatgagaacaacttccagaacccagacaaacagggtcaaccgttccaggctgttaagtgtcagacgttatccagttatgaaaaacgtattcggtttgatatcaatcagggtcgaatggatgttaaagtgggggcattgattgaggtgttaggggatgaatattcagggaagtatctgatcgttgaatgtatccgcgatgtatcaaaagatttccacctgcaaacattggaatgtgtacaggtggcagcggctacgaacgacaccagtaaaaccagtgaggcttaggccgtagtttcttcatgatagcccatgaacaggtcgaacacgttgttcttgttctgtttacgggctttcttgatattctcgtagttctcgcgaggcatatcgatcatgaagcacttctgacgcgctgtagcgttctctgtgagcgcaaacagttcatcttcggtgtattccttgtttttgtccagatcgagaatgacgcattgccaggtgtcttcatcgctggtttgttgcatcatcaccagtgcggcgtttttgaatcccagattatgcgcaagcatttcatggacgaattcgcggtcgccgtcttcataacggagttcgttgccttcccaacggataaggcgcacagtcttacttggttcatttttcataacgtggtttcctgctcataagttcgcgtaaacgtttcgtcggttcaggtgggtttttgatgatctcttgaatccgatcccacacttccggtgaaacttctttcctgtccatgataacgatattctgattatcacagcactttccaaccattacggatcgcccacaattaaggcaaatcgtatcagggcattttccaagtttatcagggtcgatagattcaaggaatcttcttgctaccgataaccgctctttaacttctattgggtcatattctttatttttcatgctaacaattgactcccctcataattggtaggaacccgacaggcaaaaaacaattgttggtgttcccagtttttacgcgcctgttctggagtatcaccccatgcagcatcaaaaccagttttcgcacagcaccagcgatgattagggtcttcgctgatagtttcgaatatttcgagtttcttactcatttcaggtcaccgataatttccatcgctgcttcgatgttttcaacaccataaaaggtattcccacttacttcaaggagtttgataccatgaagataaaccccaaccagcgcaccgatagcatcgtggatagcgtagttgccgttttgaagttgatttgcagtgtgcataattttcatgatgtttctcctttcgtttcgatatgggtaatgtaccactacattacccagtaagcaagcattatttttcgatttcgtagcactcttcaacttcgatgtttaccagaggtacttcgatatcccatgaatccgcttgtgcatcgtatacggctttgtcttcgtcgttcagaggcagacaagtaacccaaccgtcagtaacacgcatcacgcgcattttagaaaggctttcgagtgcgtccgctggcagtttttcaccaccgttacccagttgtgccaaacggtcttcatttaccagaacgattactttgccttcgagttctttagtgatttgcatgggatgttccttttgtctgtttcgtttcgatgtttgtaatataacaaaagccccttactcatgcaaggggctttttagcaaaaagtgctatttaaaacagatcagcgaagataacgtgaatatcatccggttcggtcttatcgcgtcggatcttcttgatgattggcaagaagaaactgaactcaggttcgcccttcttacgcgttttagacttctggagtccgtcaacttccatttcgacgatagcgccgatatagtcatctttgttcgccatgatgtattcgcgatccagttcaccacgttcttctaacgggatgtacacgcggttaataccgtcttcatcgtatcggtagtccgtatcagtcagaccggaacctgtgtttgttctggcttctcctgataagtcctcaaccacgaaccctccgaccttatgagcttctttggtgtgttcgtacacgtcgatgattcgcagttcaatcggggttttgttcttcaacttcacctgatccgcaacgcgtgaatccttccatttgaaatcaacgtttttcaggattgaaccctctttaccgtcattgcggtaattgttgtaatcctttttcgcttccgcgtagttctgcaccaggatagaagggatcaacttaaccgatgttacaccagagccagccagcgcaccttccaggatagagaaacgatcgcaatatggttgaacactcggagcatcgccatagtatacttcatacggtacgatatcccagacaacataaacgatattgcgctgttcttcgtcgctgatagtacctttcagggatttgtttacaatcccgttgccctcttcgcgtttcgcttccgcttgtgtctcgttctcggtagcttcccgcctaacatctgccacaaggtcagaaacagaatcgtcgtcatcgcccataaacccagcaagactaaatggaacgctgttcgaaggaacgacagcagttttttcagcagggacataaatcagttctccatcaagtacaacatcataacccagataatcacgaatctttttcagatccttgtccagattcaccaaaccttcatactcatttcccgcgcgggttgctttgcggatctgattctctaacagttcggacatacaacgcgcaccatcggctttaagctgcgagaaagcagggaagcgaatacgttttaaggctttctcgctaaacggcgtagcgaggcattgaggctgttctggaatgagtttcttccatacgcggttcggtaacgttgtacccgcaccacattccagatcgcggttaatgatacggcgaagaacttcgcgatcattctcgttcaccgatgatacgatatccagcagacgatcacgggctgcattgcccgtatattttcgcgttgccaaatcagacatcaaatccgcgatagcattcgatagcggggttgtgcctggcttaccgtccacctgcggaaacttcttaatgtgaaacataatctgtttcgtgtacgtaatgcggaaaatctcttttagcagatcattacctgcattacgtttcaggatcgcttccttctctgagattttcagagtcgaagcgagttcatttagaatctgtaagatcatgtaatttctcttcgatttcaaaccatgatttaactgactggtgaggcgaccacggggtttcacgttcaccacgcaacatatggaataacggcaactgactgatgacgttatgacattcgtttaagtttaccgcaagatcatcaacgaagcaaaccagacgattaccatatttggctttcgcttccaggtagcggtgtactttggtttcaccatgcccgacaaccatcacttctttgaatgcggaagggaacagcgtgttcaggtttgcaatacggttaaggcttgctgtaggagtggttcccagcgccgtgacagccacgaaatcatatttggctttcagacggttgatcacaatcaacgcatcgtcatacgcgcttagatagcgaataaacgaactgttattgtattcttccatgaggattttagccagttggtgatcacacccaaagatttcggtcatatcacggaacttttcatccgtaaccatatccagcgcgatatcggtcggcatgttgtgtttagacaaaaagaacgggaggccgctttgccattttacggcgatcccgtcaatgtcggtaagaataactggtttcaagatttaacctcataacgatcaaagaaaagggtactcttaaacgcttcaatatccgcaaggaatttgtcacgctcgaatgtacgataataatcaaattcgatacacagcatatcatcgttcgtaacactgataccagtgatatcttgatgatatttctttgcctgttgtagaacgaaaggatcgagatccgaacagtcgaaataaattacgtaactcattatcaacccttgtacatataaacagcgtcgaagcctggaacatccatttcgactttatcgaacacaatatctttcagcttgcatttttcaacgtagctgttgatcacgttaatgttgttcgcgccgatggtaacgtaatacacacccgctttgtagataacacccataatcagggtagaactcaaagcaccctgtgcgtggagtaatgccagcgggttaatcgcgcctttgaacaggaacgcgcattctactctttcatcataatctttcatagtaactctcagtcaaaaaatagtgcgaatattaaccatataccgaagaaaggccagaataacacgatcagcgggaaaatggtatgttttaaaagcaaagtttttggtgtgtgatatccgttatgacttacaccaaagcaccaggaaaaacgtgcggcgcagtatacaccaacaacgaggtatagaatgataccgatgacaatcaaggctatcatagtagatcccgtaatcgggttaaatttcggacaaactcacgttcagtgagtaccgtttcattcatcttattctttcccattgaatgagtcaaggtactttttccggttgcagccagcgcacggcggaacccgtcattcaggaaaagagcattgtacgcgttttcaatcaggatttgatatgcttctgattcacggtgaattggcatacccttccagtatagggtctgatcgcgataccatttctttttcttgcctttgaacttggcggctttaccaaccagcgtacacacatgcgcttgcatatctggattgctgaatttcagactttgtaaaaagccctccattgatgcacattctaccccgtcaaacgtgaacggatgcggggcgaagttgctcaatgcgcatgatggatactgactacctgatccgatgtccatcatcaccccacgaagttaacgagtaatgcagaaaccatacaacccagagcaaaaccaaaagcaatcaaagccagttcactattctgtttcattttcggcttccttcttcccttcctggcgagcgcgtttgcgtccagcacgtaccagagaatcatagtatggacgtttacgatcgatgttgtcagtgcggtatgctttaccgaaatgactcgttttgaatccgtaatacttcacgctttaacctcgtaaggcttatggagtccacgcgccggatcataacggtcatatgttgtcccgttggttgatgccatgatagagacatcctggcgacggttccagttcaacagagcaagaacgatacgatctgccgcttcaataaaatactttttcattagaaacctaccttccatactttttcgaatttgtcgaatattgcaccgatacttttcagatacgcggttgcgtcgtcttcggaatttgtgtacatcgcgaaggagtatcccccaaattcacgacacactgatagcggtttgatgctggtaatgttttggttatatacccgcatcttatcgatcattgcttcggtaatttgatgctcatgatattcgagaatatatttcatttgattgtatacccgtatttgttggtttctgcattcaatgcaatagccagcttattcagatccccaatatcaccctcaaggtctaaatcaatgctgtcaatcttcgcatcattataaagatcagtacccgcgtatgcatcaatttctacgattttcacgttgtgttctcgaatgagattcattgatgcttctgggatacgacgcatttcgaactgaaacgttcttacttcgataccttcacgcatcacgctctctccagacgggttgttacttcacggttatagatccgcgcatactggcgaatgtcttcgttatcgctggtgttcttcgcgatatatgcatcatcttcggtttcgaatgatgcggggttgcgatcgtcgtttgacagatacagtttaccgaagatatctttctttacagtctgtaccccaacaaacatcacaaaatctttttctgtgttaatggaactcatgattatttcccgaaaaggtggcggtcttgggggtttgcatcccattctttttcccagctactacgctcgcgatctttatagacaacctgaaccgatgcatttttaagttcttcgatctctttgtcgcggcgacgtaacgcggtgatcagttcgacaatgaggtgttttgcatagcgatcttcgctgttactcatgaaccccattactttctgttctaattctttggtactcatgttaagccctcaaaccaaagctacgttttttgatgacggtgacattatgaacacctctgttattgcaagtgctggttttcagagtttcggctttacgcgcacccagaaccagagttttaacaggagtcacaggagcagcgataaccacaacagcagcccaacgtgcgccaacagctttatcagtacccaggtcgattacagcagaggtatttttaccagcagccagaacatacgcacgggcttcacgacgagtgttgaagcaaaccagttctttcatgttgtaagttttcataatgtcatcctcagtttcgtttcgatggggctatattctcacagcccccagattaggtcaacaactttttagaatttcgcctgaacgtcagagatatcgtcggcgtattctacttcaccgtttttgtgctcgatccggtaagagtagcccattcttttcatttccgcgtctgggtcagagaaagcgatttccttaacttctgcaaccacaacaccattatcaactactacgaaatgttttgctgcgtcgattgggtttaatttaatcattttctcgttccttttctctgtttcgtttcgatgtgtgtactttaccacactcacgattcagtgcaagcattattttgcataaaaacgaaaaaagccgccacctttcggcaacggcttgatttttaatacttttcttctggctggaacaccgcacgacacgcccacatagaggcttctttcagtcggtctttcgccttttggatttgatggatacgttcaagcatcgcatcgagttcttcggtagtgaatgaatcggtatctgataccgcgtaatcacttgaatactcttcatccagttctttgaagatttcgcccagggcaacttctgcggccttgatgcggtttactttgtcgatcttttctttcgagtggggcttatagccctgtacgtcttcaatcgccattatatactctctgtaaaggttcgggcgataacgtcgcgctgttgttcaggagtcagtgaattgaaacgcactgcatagccggacacacggatcgttaactgcgggtatttttctggatgcttcacagcatcttccagagtttcgcggcgcaacacgtttacgtttaagtgttgtccaccttccactttaacagtgggttgaaattcaatatcgacttcacgttttgcgaatggatcaacgcgagctttaccgatcactgaatccatttcgagggttttggataccaccacacgaacatcattaccttcttccaggtagattgtgccagtgtgtaaaccttctaaaatctgatatgctttcattgtattacctttctacgacataataacgcaacgggttgatatggaacgccagcattgcacgatccagcccgttagggtcagttacttcctgtttcagtttccacccgcaatacacgcgtaagcagaactgaacctttccgactttaagccacggtttgaagacataaagcccccatgccgaatcattccacatcaacagataaccgtgacgtgatggatcggaaccaccttctgttttcgggttgcccttccaggcgaagtctgactgtgcttcacgccctaagacgtgataagcgaagttgtacgctttgttacgccacaaccagcctacacgttgcgcatacacacccagatcgcctaagtgataccggatgttagcccaacgccggatatgtccaccatcaccatcgatcgggttatcgaatgtttccatccaacggaaccctttaggtaagtgtccggtttcttcactgtagaacggaaccacgaaaggagccagcagaatagccagaacaccagaaagaatatcaaggggaaccagtacaagccagcttgcgtattttaaaaagcgcatgtgcttctccagaaaaaaggctatccgaagatagcctgttgattaacgaactgctttgatatacttatacgcttctgcgaattcttcttccagagcttcgttgcagaacggaataccttctgctttaaatccaccagtgataaggtactggataaagaatacagaagaatccatagagatcaactgatggttcgtaggttcgatatcagttcgacgaacgatattgacgatcgaccagtcaaagaatcgtcgatgatattcgtgtttgctattcacctgcggtgatgcaaagaaaccatcaacagaatacgcatcgaacgctttacggtattcgttatcgaaatctgggatttcttcggtaaacagtttcatcaatttaccgttgatttctttttcagttgatgcagcgacgatttcgcgaatttttggggttaattcaaacagcttttgaagacctttcatatttttctcttttaaatttcatatgctgcgtctatacaagattgtattagtgcgtcgggcgaattctcgataattggtactgtttcaccacatacatctgctgcataaggatcgtcatcaacataacattcacggaattttaatttatatcggtagtcatttttacataaccccgctttccattcgttgaatgtcatgccgtaccgctctttgaattgcgctggcgtaatctctttgaacgtatggattgttttgcctaacttagagtcatacaccgtcttttcacgaattctcatatagatctcacattgtttagtgggctggaagtttctttacttcaccccgcattccggggaacctattaccggataccaacagagcctatcccgtgggatatggttgcatattccgaaccatttaacggcattgcgctacgcacccgaattggagcaggtgaagggactcgaaccctcaacaatctggatggaaaccagatattctaccaattgaactacacctgcaaattttttagaactgtttgcgatagatttcgcgaaccagcggatcaacatctttcgcgtacttacatacgtcttcgaactggacgatgtacgccatgacttcatcggcacgggatttaagtttaccctgatgcgcatcaatgatcattgctgtcattacgtcaatacgcgctggggcttccagaatttcgcctttgtcgaacagctttttggatttgctgacggtatcagcgataattgcttgaattgatttagccatttttagatctcgtagattgcctggattgctttgtaatgtgcggaaacgtattttgtttccttctcttttgcttctttttcggaaatgtaacccgcaaccagatcagggtcaggaacattcgccatgtgagcgcttggcagtgggatatatttacccaggattcgttctgccgcttctgctggaacgtctacgcctacagaaacaactttaccataaaaaggttgttccccgtgctggcgtacaccaaccacgataccagattcagatttgatttcggaaccctgcggacgcgcagtagcttcgatgatcacatattcgccggatgcttttactttcagttcagacatttctttactcattgttgttaaacactactttggaaaagtcgataaacgattctaactcttcccgtttaatttgttccacgacacagccatatttctgcaagcgtgaaatccattcatcattaccacgatcgtatttatcgagataatacaccgatgtaatcgccccgctagcaacataccattcgatatgtttcgcgcagttagggcaaggcgatgcagttgtgtaaagtgctgcgtctttgagtataacacctcttgtgtgcgcactcaatagcgctttcatttctgcatgaatttcgttatcgtttgaccatgctgaatgttcaggacgatcaaccgctttcagtttaccgtcatcattcaccatatgattgttgcatgagttgcaacgacaatcaaggtcaaccgtattattttcgccccacgcgacggcacgaccacctatcgcgataatagcacctacacgattcgaaatacattgagaacgttgactccgatcgattgctctcaacatattcattactttgaatttcattaacaatcatccatatatttcagaatgtctttgatgaaatcgttatcagggttaacgatgtgatacgtagtacctgaacgtgtcaccacttcaacaaacgatttgttcgccggaatcgcatattcaacaaccggacttgttgcaatgtcctgttgaggatcattatcaaccaacccaaacacacaaccataacgaagcatcgttggttcagtacataaccatgcctgatgaatctttctgattttgtcgctcataatactcccgcccatgctacgaatttagttaccggattccactgaatcccgaactgctgttcaacgatgttacgttgactcaaaatacccagaaggaaggagaactgaccatcgcggacaatcttcactgtataaccagcaggaattttatcagcaatgcgctggcctaactggttgagtttcagttgaagttcaacaggattctcaactttaacacgatcacccagttcaaccatcacattttcattttcacgaataaccataatattctcctttgtttgtgcgggtatcttatcacacccgcactcactgtcaactgttttttagaagtcgccgtaatcaacctggaaacatgggataccgttcattcgccacatcccgactggtgtatccctgtcgtccactgcaagaacaggataatacttatcgagaatcttttcaacaagtatttgctcttttacgtggaaatcgtgacgatgatcaccttcttcgcgcatgtagataccatcgctcaggtcaacatcgtatccgatcaggcttgcagcggtatcatgtgcgcactgtgcagtaccctcacgcccagacacaacaacacaggcataaccagcggccttatacatcctgaacagttcttgaacaggagggttaggcggatcgttgataaccttcgtgaagtcatacgggctacgttgtccaactttggttaatgtcccgtcaacgtcgaagataacgcatttcggtttgctcagatctgcatagctcatagccggaacccagccacggagtttacggtactgttcgaacatcgcccagacacgggaaacaggtagagcattcacaccgcgtttatggttgcgtttcaggagttctacgatatcggcatcaatccattcgatatggaaatcagcattgaactctttcgcgatctctcgccacacatcatgatctttttggtgtaaatgggtattgtgaacgataacgttcttcccactcgccagggcattacgaactgtatcttcttgcacacggcaaacaaacagttctttctcttcggtgaagcgatagccagtgagatcaccgccagcacagtaaagggttttgcggatatcgtcacgggaaacagtcagcgtgttccccagttgacgcgctttttctttcgcccatgtagttttcccgctacctggtacgcctacagtaataaacagattcatttcacaatctcatattcaatcagttctttgttatgctcattcgttagattgagccacatatcacggttccagtcattttcgatccagagaccttctttgtccttcttcgcatcataaacctttccttcggttatgtcacggaaaaatgacttgattattttgacttgcatttctcagggtatcccacggtacacagaatgttatccgtctggtctttctgacgcttaacgtcattcatccagctacggaagattaacgaatcgggatatgaaagggcaacgtatggattgccgtcataaggcatgacaaggtattttttaccgtcaatctctcggacttctgcaaccactttccatttcacattcaccggattcaccttagcggggagcgtaggcaaaatcttttctgggggcttctcagcacacccgaccaacagaacgcccagaacaagggctaatgttgaaattttcatttgtcgtactccgccatatactcttcgaaggacttgttgatcttgatttcgatcagtcctggtttcttgaacaacaggtctttacgtccggcatccttgaccaactgctgatccttacctttttgttcgacatagatcaccgtattggtgttgtttgtctctttgacttttttgatatcagcctgtaactctttgatatctttagccaattggtcattttcacttttcagcgtgattgtcatgtacaaaagccctgctaacgaaccagcaactattacaggccatatccacgaacttatattaaacgtacccaatacgtttttgatattcatataacgcttcctcgtaagctattgatgcttgttcctcggtatcatagtaaccgatgtgtttttgcttcccgtctatctttatctgtgctcgatattttccacgcgaagccctgtaatcaacacctttggatttaaccgttttaggtgttgatttagcttttcttttcagcatattatgaagcggatctgattcctgtagattttctataccatccccagcttccaacccatgcttatgatcaataagcaaaggcagataaccattacagtaatagaaaattatgcgatgtcttaaatattttctatcgccgtgccgaattctcacgtaaggttttgatttgctcataatagaaccagcttcttttccctgattctgttttgctgcattgctattccaaaaaatttttccggtttctgggaaaacgtcaacgtaaagaagcagggaatcgatccctgctttctcttcttctaacgttgtgcttccagcgccaaagcactttgtcatttatattcttccggtataaactgttcgtagttcttcgccattaatgcaacgatgttatcaaccagcttttgcttatcggtatcatcgaaataacgcatcataggcccgaagatgatacgaccgtcaggggttaagtcagcgctcagggcgatcgcgtagtctttgcgtgattttcctttcgtgtcttcgattgcctggaatgcttttgcagtcagacgattgagactatcaaggaataacgtttcgaatgcgtcaattttcttgagtgcgtacatatcatcgaggaacatttgtttcaggtcatcgacggtattttcaacaatatttaagaacagatctttgttattgttgatgctatccttcgtgcggtgaaggtttacataccagttggttttcgctttcacaaaacctttatcagttttgattacgtaaccctcgaaaccttctttcgtgtaggcttcggtaatgaatgcatccagatcggtgatttcgattttctcgcgctcaaccaggaacggacgtaatacaccatctgcgaagatatcctgataatcaacatattcgcccgtgtcgttattacggatgttcaggatcaccactgctggttcctgatagccaattacaatacggtttgtcggtgcgacgtattccatgttgacggtgaaaccatcgttaaccagttcggtcaggcggtcgaacaatgcgcggttagtctggatcacgctcatagcgtccatagcctgttcagattgaacggatgctttagacttaacgcccagatagccggaatcacagaaggtggagatcagggaaccatcttccttaatcatcacatccactacggtttcaccaatcgtcacaggagaggctttcagctcttcccatgcctttacctcggcatagttgaaaaacttctccatagggcgactggcgagttttacgggggtttccccatccatcgcaaacatgataccgcgacattccagcgcaccgggttttaaccagtcggaatagctcgccatgcgatagttaaagatgcgcacgttggtttgcatcacagttttttgatcaatgaagtagaagcattcgctttcgttacacagtttcatcaactggtcaaagagggttttctgatttttggttagctttgtcatagtgctgtttgttccattcaggattgatttttcggatcatgtttatttcaaaatcatgatatgtgtcttcatcgtgtgttgtcacgataagatttacacgcttacgttttttgattgccatttccagacgtgcggttttcaaaatattactggggtttgcttccctccagtatttcgaattgcggtatgtgtctaaccgcttccacaaatcacgacattttccaacatacactatccgaccgtcgatttcaataaaatacacacaatgccggaattcgccacatttaacgaaactccggtctatcctcttgtctgaacccagacgcaaaggaaatattacaccaaatgttacatcgtccattatatatccaacttattcacctttccggtcaacacattgacgcagtgagcaatataatcaccgtggcacggtagaggtttgcatgtacatcctaaccgcttcccgtccaatgctttcagttcgtcgattgtgatcacgccagttcgaatcaagttttggaaatacgggatgaacttcattatgttttcagcccgtgttcccttgtagaagggattgccgaatttcgtacctctctgaatatcgacatcccagctacctttatacttgtttacgacgcgacaatcaagcgtatttttgtcgccattttgcataggcttcgtcgctgatctcggtgttgaggttgccaaccaggtaagaactcacttctacttcctgtggggctacctgtacgttgtcagacttcaaccatttgttcatccacggatacgggttcggcgttggtttaaatggagactgcaagccaaccgcgcgcatacgctgatctgtcaggtgttcgatataagcgatcgtacttttcagggatacgccgtctacatcaccgatagagaacaggtgttcagcccattctttttcctgttcgtacacttccaggaaaatctttgtcgcttcttcttcatactggtaagcgatttccgccatttctgggtcatctttacccatctgccagagtcggatcttgctttgagtgcctttctggtgaagtgcttcatcacgggcaatcagacgcatgatcttcgcgttaccttccatcttgccttgttcggcaaagttgaacgtgaaggtaaacgacacgtagaagcggatcgcttccagagcgttgacagcgtgcatacacaggtatagagcaaccttacatttacgcatttgctctttgcgtttcttctcgtactctgcgatcgattcgtctgggtatccgtgggacgttaacatttcgattttgagcacgatgtttttcagttcatgacattctgcgatcaggtcatcgtagtattttgtcatggaagccgaacgtttcataatcgcttcgttgcgcagaattttatcgaactctttcgacgggtcgatgtgtaggttgcgctgaatgtgcgtataactgcggctatggattgtttcgctgaacgcccatgtttcgatccacgtttccattgagacatcggaagcgatagggaggaacgccaggttcgggccgcgtccctgaatggtatccagcagggtttgatattgcaggtttgaatcgaaaataaccttttcgtgttccggcattttcgcgtactgcatacggtcgatagacagatccacttcttccggtcgccagaagaatgacagttgtttttcagtcagggtttcgaatacacggtgtttctgttcttcgtatcgtgctacgcccgtatcctcaccaaagaacataggctgttctaagtgtttgtgatctgggtttgtgttcattacagttaacatggatttaccttataaaaagcccccgaaggggcattgaatcaaattttgcaaccttcgcaatcttccgcttcttcctcacctgcaccgtcgcgggtgttgtggtagtaaagcgttttgatgccgaaatagtttgcatacagcagatcttcaaggatgatttcagatttcactttaccatctgggaagttagccggatcatagttggtgtttgcagagatagcctgatcaacaaacttctgcataaccgctacgtgcgacagataacctttgtttccacgttttgccattgtccagagataatcatagaagtcaatctgattattctggtttggtactacctgattgaatgaaccttctttcgaagatttcacactcacagggccgcgcggaggttcaatcccgttggttgagttactcacctgcgagctactttcacaaggcattaaagcagaaagcgttgagttacgcaagccatgttttttgatttcaccgcgtaaccattcccaatcgcagttatacacaggtgatgccagttcatcaacgtttttgcagtaccagtcaataggcaacagcccttgtgcatatttcgtttcatggaacagtccacatgcaccgcgttcctgtgcgagttccatcgaggcaaccagcaggttaaattgaaacgcttccatcaactcatgaacgtttccggcgtatgcttcggagtagtcgcaatagttgcttgccagccaggatgcatagttggtgataccaacgcccagagaacgacgctgtttggctttcagagccgctgcaacagggtagttctggtaatcaagcaagttatccagtgcgcgtactgcgatgcgtgtaagggctgggaattcgcttatatcggcattatcgagaacgatcgccataagcgtacacagtccaatttcgccagccagtttatcatcgtcatccagtggtgaagttgggatcgcgatttcacaacacaggttcgacatacgaaccggaacagagaaactaccctgctggtttacgtgatgactgttgaaaatgtatttgcgtccggtctgtgcgcgttcctgaacaagcaactggaacagatctaccgctttaatacgtttcttgcgtaccgttgggtctttttccagactggtatacagttcttcgaactcactctgatccgcttgatagaatgcgtcatagaggcgatcattcgcaacgtcagggctgaacagggtgatgtaatcgttattgattaaacgcttatacatcaaatcgttaagctgtacgccatagtccaggtgacgaatacggttttcttcaacgccacggttatttttcagaaccagcaggttttcaacttcaagatgccagatcggataatacagggttgctgcaccaccacgaacaccaccctgtgaacaggatttaaccgccgtctgaatgtgtttccagaacgggataacgcctgtatggactgcttcaccaccacggatttttgaacccatagcgcgaatgtgtcctgcgttgacaccgatacccgcacgttgagagatatacttcacgatcgcggacgtaacagcgttcagagaacccagagaatcaccggattcgattacaacacaactggagaactgacgcgtaggagtacgcacacccgccataataggcgtaggtaatgacagtttacgatccgaaatcgcgttatagaagtcaacaacatgactgattttatcagcgtgtttttcgtcctgatgcagacacatcgcgatcagcatgaatgcatactgtggtgtttcgtagatgtcgccggacgtgcgatcctgcaacagatatttcccgatcaactgctgaacgccagcgtaagagaattcaaaatctttatcgtgattgatttttgattccagataatcaatctcagcaggagtccattttgtcaggatttctttatcgtattttccagcctcaaccagcttagtgatgtgttcgtagaacggaatcgggtcaaactgcccgtaaacggttttacgaagggcgaacatttcgaggttagccgctacatactgccagtcaggttcttttgcggagattcgatccgctgcatacttgatcgctacagcctggatctgtttggtagtcataccatcacgaagcaggtcaacgacactttcaaggaatgcgttaacatcaatatttcttccaatactcgcccaattaaggactttgaacagtttttctttttcgaacgtttgacttacgccagaagacttcactactgttttaatatcactcattatcttaccttgttaagaaaggggctttcgccccctttgtttatactgccatagctgcttttagcgagccgtggtgattatagtctttcaaatggatggagtcaaagaattcttgatccaaatcaagtaagctatttaccttcggcatataaagggtcggaagtggaagcggtgcgcgttccggcttcaacaactctttcgcttgttctactgcgtttttgtagatatggacatcaccaccagtccaaaccagatcgcccacttcatacccgcaaatatcagcgataatatgcgtcaggagagcgtaggaggcgatattgaacggcaaccctaagaagacatcaactgaacgctgataccattgtagagacagtttaccgttgattacgacgaactggaagaaacagtgacacggacgcaaagccatatcatccagatccatcgggttccaggcagaaacgatgatcccgcgatcgtctggtgtggttttcagttgttcgatgattttcttaatctggtcaacaccataataagaaccttccgcaccaaatgagcgccattgatgcccgtagatcggtcccagataaccatgcgtataacccagcgctttagcctgattttcgtagttatcgtcccagatcgtccgcttatcgctatcttcaccccacgtcattttacgcagtgtttccacgttggtagaaccttcgaggaaccattgtaattcatgcttacacggtttgaagaatagctgtttgctggtagtagctgggaaaccttctgcgaggttccaacgtgcttgcatcccgaagatgcgcagtgtaccaacaccagtacgatcggttgattcagtaccgtgtgttagaacggtgttgacgatatcaagatattgtttcattttatgcctttttcgtatgtcgatcgacgataatttttctgacgcgttcgtttgattcgatctgctgaattttgaaatcagtcagttcatatttcagaaccgcttcacagaattcaggaaccgtgaacgaaacatcacgtttaaaagctggtgcattatatacatgatgtccgtaaatgtgcgtcacaaccacttcatcaaccattgtattattgattgcttgcagaagcaaccacttaccaccaatgagacacacatcacgatctggatgcgtttctttcattacgtcgattgcagcagacaacccgccaccgtggatgacataatcagcggtattcccgttctttgttaccagacgttgaccggatgcagacagaacgcaatgaactcgccctggcaatttaccaggcagagaagtaaaagtgttcgcacccatgatcaggacgctatttgcggtttcttctttgaagttctgcaaatcctctttgcagtggccccacggtaaaccctgttcataaccaaacgcatagtccacttcgtacatatcatgaccaacggcgaaaactgcttttactttgctcatagcgcgatccacattttgttgtcttcaatagtcacgatgtagcccatagcttcaaccatgacgcgcaatttgtctttacaggcttcattgtacccgcgaatcttttcaaattcaacagaaaagatactcaaaccgttaacatgagcgttgatgattttggattccagatcgaacaccatcacatctaacggactccattcaacagaatgaagtttttcgcgggttaacagggttgtgtgttttggtagtttcattggggtacagtttgccatagccattgttccattttacgtaaatcttcctctaacggagtgaaaccaaatgattcttcgatcacaccgtcttcccatacatcaatttccagaatttccgttaccggagggtttgacatcacatgatcacgacatgcagccatagcggtcataatggaatttgttactgtcagggtattgccctgaaccgatacctgaataatcatactttcacccattctttatctttagtccatgcggttttcaaggtaaaacgctggcggtaatgcatacccaaacttgggggatgcagcgaattgataccttcgacggcgatccgcattgcttcgaacttctcgcgatcaataaactgccctggtagaactggcattctcacacagtcccattcgtaagtatcgctgatctctttactggcattaaccagaatttcagcaatgtcaaaatctgtaggtgcgaaccatcccagattgataaacacgcgtttttgcgtaccttctttcaggttttcaaagtgcgcccatgttggacaactcatagtattttcctcataaaaaagggaactgcttttcaacagttcccattatagcataatcagttagtgtttcaagcgccaaagagcgattgcttcatcaactgcttttttaatttcttccggcgtgtctttgcgtccggctttaaccagggcagagagcatagaacgaatggttgcattcatctgtgacttctcacgatccatctgtgcctgatgcgccttatcaaccgctggggcttctttcttcgctgcctgtggtttcgtaggctgtgcgcctaactcgtccttagcttgcgtttcagtgcgtttctgttcggcttctttcttcacatgaggtgcggagaatttaccagccttgaagttatcacgcataccttccaggatcttacgggctgtgtaccagtcagcaacaccacgaagttgtttcagggtatcaaccagcaaaccgatacttgcgcctttgctatcctcgtcaatgtcgatatctttcaaccattcaacatgtttctgaccggagtgcataaagttaaagctgctgaaactccagaaacctttacggttgctgatctcgcgtttgaagtggaaagtcaaacccgcgccgttatcaaactcaccgtagttactgcggaatgttgcccccgcttgtttcagtgcgttgaaatagtcatctttattgatgcggttaacggtgcgtttcggtttctgttctggttccggcgctgctgcttgctgtgcggtacgtttaacaaaagatgctgaacgatgccccgctgcaaactctgcgttcatcctgtcgattactgctgcgattccgcttgcgtctggtttcactttctgcatttctttgaaagtgtcgatgatcatatccagacatgcaccgtcttcgtcttccagcatagtacctttcagacgttcagcaggtttgaatttgttcacagttgggtcaacaacatactggaacacatacgcgcctttacgcatgaatacgtgacggtagaagtgaactttatagtgtccaacatcaacaataacatcgttaccgctaaccttcgcacccaggatacgggcaaaggatgtcatgtagtccgcgcgtttgaacttgagatccttcttagtcgggctaaagatggattccagtttcttagtagggaacaggctttccggcgtgattttgtctgggttcttgccccattggtaatcgcggcttgccattttgtgtttcttcgtaccaaccagaaccagagtattaactgatacgctacccagtgcggacgcgtccggcgctgctaaaccttgaccgttaggcggttgacaagagaaagagaagtcaaagaacgcatcaccagaagtgaaacgataggttgcgtgaacagtgtgaccgcgaacttcgctgattgtctgggtataggttgttggttgtccggtgaatttcgtgaaatattccgcaaattcttgcgcgttgaatttagtgctgaaatagtttttcgccagcacgaaatacgctgcaaatttttcttcccacgctttcttgtttgctgcgtgttctgcgcgaacatcactgaaagttttaccagcgctgtttgttttggttacaacgtcatacgcctggttgattttctgcatgagttcagtgctaccaccacggtcggggtgattgcgcagagaagcacgtttaaagagctttgacagttcagctttagattcgtcgccagtagcgcccaaaatcttcaatgcttcgctgtgtgacatttgttcgttaatcattttccgttcctcaaaataaaaacccgtgcaactcagtacacgggcgactttaaggtatttatgttttactgtcaatagattttttcgaggaaccacaccgaagatttattattcttgatgcgggtcaattcaatggggttatctttgaatgcttcctcaacatctgccattgtaactacatgtttttcttccaatagttcattatggagataaaacctctccacttcgggagaggtctttaaatcaaattcacgttctaacatgagatcgccatatctttgattgatggttttgtgaaccgcccaaccttagacatgatgatgtgtcggtcgaagtcctgcggatcaagatcctggtgactgattacaataacgttaccatctacagaatccagcaaggatttaatcgcgaatgaaccctctttatcaagtggcccatcaaacacttcatcaagtaccagcagagacagatccacgcctgatactttacttgtcacgtcacgccatgtgaacagaatagacaagttgatgcgagcgcgttcgccttgactgaatgacgcataactgaaatcatcgcgccccagtgatttgatcgattcgttgaactcgtcatctaaagtgaactgataatcagcacccaacagatccagataatatgctatctgtttgttgaagtacggaatataacgcttaacgatgctcgctttaacgccggaatctttcaacatatccgtaacaataccacgaatatatttttccttgacgtagccttgtcgtttttcgttcagttctgcttcctgctgttgcaactgcttcacgggttcttcatcaatgactacttccgcgcttgcctgttccatgatcgcctgtgcgcgtttagcgttggcaacttcgttttgcagtgtacctttcagggcttcatatttggttttcagggcattgagtgcgcgttgctgttgcagcaagtcattcatgatcccttgtaactcgtcctgtttggttttgatcagggttaaacgttgtgtacccgctttgatgttctctgcgatctccgccatacgctcaggagtgggtttaatcgcttgcttacatgccggacactcaccgcctttctgatacatcacctccagctttttaaactgttctacagtcattgagagccgcgaataaccgtcacggagtttgttgatatcttccgtccggtcttctccagtgatcaccgattccgcaatctccgcttgcaactgcataagctgtgctttgatgttctttgcggtttctacgtggctatcgtagatctctttgtatcgggcgttgttctggtttgctttcgctcgctgttcgtcaatgaagcgctggtgtgttgcgatctgctgctggatgtgattaccctgcattgagagtgtatccaactgctgattaacaccgcgaatgtatgacttgtttaacttgtccatttcactgatgacggacagagacagcaaatcttcaaccagtttccggcgttcgggggttttcagttccatgaatggagtgtaacccgctgtacccagaacgataacctgtttgaagcccacaaggttgatgttcagcatagattcaagctgtgcctgataatcacctgctgcggagtcttccggcaacttctcgccgttcttccagatctcgaacaccttcggcttttgtccgcgcacaactttgtacgagtctttcccgtattcgatttccagttcaaccaggcatttctttttgttgacgctgttcaccaactgcccgacttttagatcgcggaatgacttaccgaacagggcataggttaacgcctcgatcagtgtcgatttaccgccaccgtttttccccgtgatcagggttttttttgccgtatcaaattccagttcgatcggggtgttcccaaccgacagaatattttgatacttaatttttttgaagtttagtttcatttaaaatccgttcacataattcagtgatcatttgaacaactgatgaatcaatactatatgatagagtatcgtcgtccagtgtatcaagcatgaatattgaccatgttcgtgatgaatgccatgcacccttcatgatggtcaaacaaactgcgctggtttcccctgcttcgtcggatgtggaaatgatgtgtttcattcccaacatacgcaacaggtgagaatatcggggattttccccgaaatattcatcataacggctatgcacttgacacctccgcgtatagttcgctgatcagcttattcacttcctctttttcatcgtcggtgatctgcatgttggcgatatactcagtgataaggccacgaacggttttgatttcaaagtcggtatcgacatccgaatctgtttgaactttgtctatgatattgatttcataggcaatttcttcaattttggtttggaactttgcaagcccctgatcaatttcactgacaatcagacgcaccgcgcagttgcggaactgttcgagatcaacatctttctgtgctggatacatgatccggcgatggtgacacacagggttagcgatgaaagtcaattcaggcttgcccgtgaacacatagaatccgcgtgtttcgtcttcgtcgtttgcgctcatagtcagaggcgtaccgatataaaacacgttatcaccctcgttagcgtggtgatagtgtccagagtaaacacgatcgtacttcttcaagaaatcaggttccagcccatgatcggctttgctgttcttgtagaaatagtaaccagacagttcgaagtgtcccaaacaaaagttagctttcgattgtttgatgtagtcaaaaatacgctggctgttttcctgacaaatccacgggatcaggtcaatcgaatttccgccacctaaatcaaccgtggtcggttcgtcaatgacattaaagcattcgtattgacttagtatctcgcgtggcgcgttggggcgtattttgtccttaaattggcaatcgtggttgccgacaagaacatccagagtgatccccgcctcaatcagaagaggaaccagcttttcacgaacaaaattcattgtcgtttgtgtggttgcttttcgaacgtcgaagaagtcgccagcatggaagccgcgcgtgatcccgtgttctttgcaatactctacgatctgtttgaataccgcatacaggttttcttcgttccaggggttatcctggcgaagtccggcatgggtatccccaattaaaacatagttcatataaacctcaaaacccccgaaggggtttatttgccgtatttttcagaagccatgatgaacaggtctttcaactgctggttcgaagtgatccacatcgtttcaatcagttcatcgttgtatggttgcttgagcatatcacgcatctttttgatcgcgtatacgtactgctctttgttaccttcgaagagtgcgttctctgcgtgtttatgcagtcgcttccattccgctttgttcttccgcatgaacttttgcgctttgcgtagggcttcctgttcaatgcgtgtacccttgatggagtccagttcttcttcacgaagatccagcgctgatttttggtgtacttcgtcgattacttcatgctgcacgttcatagtaagtgatctccatgatcattgtttcggcgtttattacatagtccagacgaccttctgttatctggaagtctggatctcgtacatctgtagggtcgatgataatcggaatccctaagctctgcaactctaatttcacaaggtaaggaagcagatcaatttcgtcgttagcatctgctaaaattttgttcaggtcaattttaattttcatagaaacatttccaatgttggcgattcgtccacaacctcgattttatctttgggttttttcgcggactcttcatactgattaagtttgtcatggatatcctgaatgaaagtttcatcggctatcgtggtcatatcagtatcatcgctgtcatagacatgttccaggaagtatttgtatttcttcgcgttctctttcttctcgtagagaatacgagttacaaacgcttgccagcaagccttgttgatgtaaccgtagacgtttgtatatttggtttcgtcaaagttatgaaggccggaaatcgttgccgaaattccatcatcgatcatatccattttccagtcttcggaataacggttgaagttgtatcgacgtgccaaaccgtgagcaatgttcataatcgcaataccgagttcatccggcatcttacgatcaccagtttcacggatttgctgtttccacttacacataactggatacagcttatcattatctgcataaatctttgtagtcattatattctccaaattgaatacattcattatagccgattgaatcaggtgtttcaaacctacttccaatctatattatttaataaaatcagcgcgaagcgcttccgtgagcgaagcgaaacggatagttagatctggttaaaaagtatacggaaatgtactgttttctctatatataaaatataaaaatattaaaacgtacattcagtacatagacactcactacgttcgtgtccttcgcttcgctcagatttttgaaatgatctattgactttgaaaaagtgatcactataatcagtttcattcaacaacaacgaggtattgaaatgtcttcatttgcaagtatgttcaacctgaacagcttaatgagcaatgacgatgatcctgttgatgtgatgtgtatagatatttcaaacctttcggtagcaacgttgatgaacaacttcaagccgaaagaccagaatgacatcaaccaacaaattgttcgtcacatagtgcttgacaccattcgtcacaatgtggttaaattcaaaggcgagtaccctgaaattgttctagcctttgatgataacaagtattggcgcagaagtaaagcctggtactacaaaaagaaacgaaaaatggaacaagaagcatcggattgggactgggatcgcctgaatggtttccttcacccgacatacgatgaaatccgtgctaatctaccgtacaaaggtatccgtgttgacttcgcagaagccgatgacgtgatcggtgtggtgacgcgtaaagcggtatccgaaggtaaacgtgtcctgatcgtttctgctgatggtgactttgcagcccttcaaaaatatcagggtgtgcgtcagtggtcgccaacccaaaagaaatgggttacaccgaaatatggttcgcctcgtaacgatttgcgcatgaagatcatcaagggcgataaaaaagatagtatcgcttgcattaaaatgcgaaatgactatattgttacgaaggttgaaggagaacgcgccccacaaatcagggctgctgaactcgaagcctggctggaagcggacgatccgaccgtgggtatgcccgaagagtgggcgatccgctacagagaaaacgaagaacttcgcgactttgattttattccgaaagatgttgcaacggcaatcgaagaagcgtacaatgctccaaaaatcgggaacaaagcaaaaatggagaaatacttcatggaatgcaaacttacccgtatgtatgaaaaactaagtgacttttgaggtaacaaaatgagtgtagaattactgcaagaaaacccagacatcgctaaagcggttaaagaactgatcaaagaagcgtcgaacgtgaaaacccagatcgaacacttccagggttctttcaaagacatcaaatccaaagcgaaaacggattatggtatcgacggtaaaaccttcggcaagctgttcaaactgtatcacgaacaggcacgtaccgcgttcgaagaacagaacaacgaacttatcgaactgtacgatgtgatcgataaggcgtaatatgagcgaaatcggaaacaaaaccgaagtcggcttgtatatcgaaaatctggttgcctctgagggggcaacctacatggaagctacgttacaatggatggacgaaaacagcattgattatgctatgctgtccaaaacagtaccgaaagcgatcatcgacaagattagcgacgaagccattaaaaacaatctgctgcgtccttctgtggctaaagaccacgcgacgacgcaaacactggatgatttcatgtgaaatttaaaaccccgtttgacagttcagacgctaattcccgtttgaaaccgattgcggtatacaaactgtatctggtgatgaaaaatcactttgcgggacggtatgacgcgatcaagtacaaatgggaaataaagatcactgaaaaagcgttcgaaaagagaagagataagtattttttcaaaaagttagccgaaaggtttacatttaaagaaatatatcttatacttctctccaacatggtagctaaccccgacttctgggtcggggatgtagacgaagatacgatcgtgttttatcgtcaatacataggcaagttgaggcgaattgataatattttcgtggacgatgtaaaaaacctgtatgaattttcccgcatgaaaggcattcccctctcaacggtgtttcagtatagcgtcaaatcatcaacctcgtatatcagcaaactcgtacagtctggggtgatttcttatgaatcattcttgatcctcgactcgtttttagacatcataaataaacacgatgaaatcgcaacggatttcgtctggaatgaatttagtaaaaaactaaacgcatacagaaaattagttgaaatcagtaacgaagaaatcgtaaaataccgaaacttaatgaaacaaactttaattaacttaaacgagaaataacatatgtcattctttaaacgtcaagatccaaccaaactgcaagaacaagtcgccgctctgaaaggttcatccggcttccagaaagatgaaaaagagtggaaactcggtgtcgatgcacagaaaaacggttctgcggtgatccgcttcctgcctaaccgatctgatgatgaactggcgttcgtgcgtatcgtcaaccattcattcaaaaagaataaccagtggttcatcgaaaactgcccgtctacccacggcgattacgatgcttgccctgtgtgtcagtatatctctgaaaacgatctgttcgaaaaagcgaaagtgaaaggcagcgaagccgaaaaaacactgggtatgatcggacgtaaacaatcgttctgggcgaacattctggtggttaaagatccaatgcacccagaaaacgaaggtaaggtgtttaagttccgcttcggtaaaaagatcatggataaaatcactgcggctatcgcggggaacccagatctggatgaaccaggtgttgctgtgacctgtccgtttggtggcgctaacttcaccctgaccgcgaagaaagtaggcgactggcctaactacgacgacagcaaatttggtgttcctggtccaatcaaaggtatcgaagacgaagcgcgtcagaaagaaatcttcgaaggtatgagcgatctgcgtccaatcactgcaccagaccagttcaaaccaacggcggaactgaccgcgaagttcaccaaagtattcggtggtgctgcaatgggtgctggcgcaagcgctggtgcggatctggattccgaactgaattcgtttgacaacgaactgaaaaacttcgataatggcaaccagtccaaaggtgctaaagaatctggtggcgtaagtcaactgaacgtaggcggaagcgtaccggaagatgataatacacctccgtttgacctggaaggtggttccggtgatgacgacctggataaactgctggatctgtaatgcttacgggggcgaaagcccccaatttgaaagtttgaggtagatatgaatttagaacaaaacgtatatgtagcgcatctgaacaacgttcgcaaatcctgggtaggtaaagtgccggaaaacatcaaagagattttccgtgcgatgcctcaagctgaacgctttgagcattacaaacggatcgacgaagcagtaagcgcagtacataccggactgattcacgacgctcgcgaagcgggtacgaaaatcacagaatccaaaagcaaagaattccttgacaatgcggcggatcgcgttgtagaatccctgattaacggcacttttgcctaattgaaaactataggttgaatatgaaattctctaaacaaacgatcgatatcctgaaaaacttttcccagatcaacccgtctgtaatgctgaaaaagggttcgttcattatgacgaaatccatcaacagcgtagtttacgcagaagcaacgatttctgacgtaattgacgaagatgtaggtatctacgatctgaactcattcctgaacatgctgaacgttgtaggcactgatgccgaagtaactcacgatctgtccactggcgaaatcgtcattcgtggtgagaaaatgaaaatcgttgagcgttcaagcgatccaaccacaatcgtacagcctaagaagcgtctggaaatgccagttgcggatctgattttccagattagcgcgaacgatttcgaaaaacttatcaaagcgtcacgcatgatgaaactgaccgacctgtctgttgagccaatcaacggcaagctggtaatcaccgcgaaaagtaaagaaagccagtcaaccttctctgtggaagtgggcgattacgaaggtgataacatgttcaacttcgatatgaagattgacaacatgcagttcatcaacagcgattacaaagttgaaatctcttctcgcggcgctgcgaaattctcgtccgaaaacggcgttgcgtatgtagtggtacttgaagcaaccagccagttcaagtaagataaacaaagtagtacacaaggggcgttaagcccctttttgataatcaattgaaggtaatattatggaacttagtgaaaacgtacagttaatcgaaaccaaatacggcaaaatctcccagtctcccgaagaattcgcatgggatcagcgctatcgcccgacgacgatcgatgaatgcattctccctgctgctgataaagcgacgatgcgcggcttcatcaagtctggacgcatcgacaacatgactctggtttctgattccccaggtacgggtaaaacaacgctggcgctggttctggctaacgaagttgatgcggaagtgatgtttgtcaacggttccgattgtggtgtgaacttcatccgtaacgaactggatcgttacgcgtcctctatgacgcagaagaaaggcggtaaaatcattctgattgacgaattcgatcgccctggtatggcagaagcacagaagcacatgcgtagctttatcgaagcgtacagcaagaacgttactgttatcatcaccgcgaacaacatcaacgggattcaccctgcgctgatctcccgctgtccggtagtcaagttcggttctccgtcgaaggaagaacgcgttgaactgatgaagcaaatgatcaaacgctgtttcggtatcctcgaaatcgagaaaatcgaatatgaccagcaggtgatcgccggattcgttaagaagcactacccagacgcgcgatccatcgttaaagctcttgggttctattctaagcgtggcaaaattgatgctggtattctgtctgagattgttggttcggacatcacaccagtgattgaggggcttaaagcgaagaacttcaaagcactgcgagccgaagcaatcaagtacgcgcctgagtatgaaactttcctggctaaacttctggatgcggtatacccgatcgtcaccaacgaatctaaggttgcactcattcaggcagtaggcgaaaacaacgcacagtacgggctggcagtgaacaaagagattcacctgcaatacctgttcatgggcttaatgcttaccctcgcgtgggaggcttaaaatgtcactggctgcttttctcgatgaagatgaactgaacgaacatgaagcggcctggcgttctaaagactgggacaagatcgaagaacttgtgaaagagtacaccaaagacaaggaaaacaccttgtttatggtgctcgaagaactgaacaacgggaagacaccattacggatctctgcccttgattcatacgataagtttttcatcgacaatgcaatgagccagcatatcgaaacgctgatacctgcatacacgatgaatatgatcggttccggtttaccagaccaggcgcactttgattattacctgcatacggtgcgcaaaggtaagcggttcggggcgtgggctaaactcaccgaagataacgaaatgaaagttatccttcatgttctccaaaaacgatacggtgtaaatacacgtatagcaatggaatattacgaagaactcaaacagcttgaaaaactggacgagtggaagcggaaaaatatgaaagttgctttatctgtgttggctgatgttgtgaaaaataaaaccgaccagaaaaaggttgaacaactaataaagaaatggtgatgtatgaacatgctcgaaattaaactgtccagcgatgacagtttcctgaaaattcgcgaaacgctgacccgtatcgggatcgcaaataacaaaaagaaaatgctgtggcagtcttgtcacatcctacagaaacaagggcgttattttatcgtacacttcaaagaactgttgaagctggacggtcgccaggttgacatgaccgaagatgacgaactgcgccgcaataacattgcgcgacttctggaagagtggggtatggtttccatccttacgccggatctgaaattctccgaagagaacaacttccgcgtattgactcacgcacaaaaagctgaatggactttgaaatacaagtaccggatcggtcattaatcaaaagcccttgcagaaatgcaggggctttgttatattggttgtacaccacttgtgaggactaaattatgaaaattcgtattgaagaaatcatcaaagctattgaatccggtgatcacttgatcaaccgtctgtatagcgaagacatcaaactgtctcttacttgcaatctctctgatctgcgcacctacgcatacgcgcgggatcacttccctaagttttatacccgcatcatggaagaatacactgtgctggttgaacaactaaatcggcctgacacccaacgctatcacaaattagcgcaacgctcgcttgatctgatcaagctggctggggtatcattcctgtcacgattaaacacggagaaagaaaaccgtaatgaatgaattttatctatccgttgagcaaatgggcgatcacatctacgagcgcttcattgactctgagggacgcgaacaggttcgcaaaacaaaatatgcgcctacaatgtttcaacacgctatggcgggtgtagactcgccatatcgcgacatttacggcaagacctgcatcaaaaagaacttcgaaagcatcaaagaagcaaaaaactggatgcagcgaatgaaagatgtaggcatggaagcgctaggcatggatgatttcaggctggcgtatatctccgatgcctacagaaaggaaattgaatacgatcgagacaagatccgcattgcttcacttgatatcgaagttaccgcgcctgaattccctgatccacgcgaagcaaaatacgctatcgacgcaatcacacactatgacagcgttgaagataaattctttgtgtacgatctggtcgagggcgggttagatgaatgggtagcgtcgaaagttgataccgaaaacgagatcagcgaagaagacttgaagaaaattgtttaccgttcattccagaccgaaaagtcgctgatgtctgcttatatcaaagactggaaagagcggacacctgttattgttacgggatggaactcaaacaagttcgatatcgcgtatatcattacccgttacttgaatatcttcgggcaaaacgttgttcgtcatttcagcccgttcgggaaagtgactgcgaagacaacgaccgaccatttcggtaacgaacaactgggctatgagatttacggcgttgctcaaatggacggaatggatctctataagaaattcagtttcaccccgcaaccgtcttacgctctgggcgcgatcgctgagttcgaaacaggtaaaaacaaagttgattacgaaggttcgctgtctgaacttcgtcaagcggatcaccagaaatacatcacgtataacatcgttgacgttatccgcgtgttggatatcgacgggaaacgcaactttatcgaactggttctgtctgtagcgtactacgcgaagatcaacttccctggggttatgtcaccgcttaaaacgtgggacgcaatcatttacaactctctgcgtgaagagaagaaagtaatcccagaaaacaaacgccatactaaaacgccgtatgatggtgcatacgttaaagatccggttgtcgctccataccgttacattgtatcgttcgacttaaccagtctgtatccatctatcatccgacaggtgaatataagccctgagacaatcgctaacagctttgcagtgcgtccgatgcatgaatacatcaataagactgcgccgcgtcctagcgacgaatttagctgctctcctaacgggtggatgttccgacgcgatgttaaaggcgtgattccggtcgagatcaagaaagtatttgatcagcgtaaggcgtggaaaaaacgaatgatggcgggtgagcgaaatctcgaactgattaagcacgaactcgaacacctgacagacgcacacaaccaaatgatcaaccctgatttcgagttctacgaagatttcggtgatgaatcaaaagctgtactgaaaacgctgtctaagcaaatgcttaaagccgtgaagaaagtgtgtgagaagaaaatcgcacaggcgaacaccgcacagcttaaccgtaaaatcagtatcaactccctttatggtgcgttgggtaacgaacatttccgttacttcgatattcgaaacgccagtgcgatcaccatgttcgggcagttggctattcagtggattgagcgtaaggttaacgaataccttaacgaactgtgcaacaccacggattacgcatacgtgcgttactgtgacaccgactccatttatgtttgtatggacaacgtgatcgcgaaagtcggcggtgaaagtaagttcagggataacaaccattgggttgacttcctggataagttcagtaaagaacgcatggaacctatcattgataagggctaccgcgaactgtgcgagtacatgaataacgtcgaacacctgatgtttatggatcgtgaaatcatttctgggccacctctgggatcgaaaggtctgggtagtttctggacggcgaaaaaacgatatgcggctaacgtatgggactccgaaggaacccgttatgagaagcctaaattaaagatcatgggaatggaaacccagcgaagcagtacaccgacagcggttaaaaagttcttgaaagaagcgatccgtcgcatcctgcaagaaggtgaagaatccttacacgaacacttcaaagtatttgaagaagagtataaggcgcttgactaccgcgaaatagctggtgtatcatctgctaataatatctcaaaatataatgatggtgctggcttcccaatcaaagggacaccaaaccacatcaaaggcgttctgttctttaaccgccatacgaagggtattcaaggaatcaccccgatcatggaaggtgaaaaggtgatggttctgccgttgcgagataaaaacccgtggcaagctgattgcatcgcatggcaatccggtacgcgtttaccaactgagatcgaagaagatattttgaagtgggtagactacggcggattatttgaaaaacatgtgattagcccgttgcaaaacatcacggaagcatgtaaaattgattacgaaaaacgcgcatccctgaacactctgttcggtgatgactggtaagacctgacggggcagaaatgccccatttatataaatttgtgaggaaaatattatgcgtgtatataaaccggaaaaataaatgtctaataaagcactcctgaaaaaactgatcaaaaactcgaatagtcaatctgcgtcaattctgtctgaaagcgatgttttcaataacatcaccaaaactcgaacccgtgtaccgatcctgaacctggcgctgtccggcgctttcgatggtggtctgacttccggcttaactctgtttgctggtccgtcaaaacactttaaatcgaatctggggctggtgacggttgcggcgtacctcaaagcgaatgaggatgctgtgtgtctgttctacgattcagagaaaggcgtaactaagtcttacctgaaatcaatgggcgttgaccccgatcgtgtggtgtatactcgtatcacgacagttgagcaacttcgaaatgacgttgtgagccagcttaacgcgctggaacgtggcgacaaagtgatcattttcgtggactctgtaggcaacaccgcgagtaaaaaagaactggctgatgccctgtctgacaacgacaaacaggacatgacccgcgctaaagcacttaaaggtatgttccgtatggttacgccttacctggcggatctggatattccgatggtgtgtatctgtcacacatacgacacacaagaaatgtacagtaagaaagtcatttccggtggtactggtctgatgtattccgcagataccgcgatcatcctgggcaaacagcaggtgaaagaaggtacggaagttgtcggttatgacttcatcatgaacatcgagaaatctcgcttcgtgaaagagaaatccaaattcccgcttcatgttacctatgagggcggtatcagtatgttctctggtcttctggatctggctatggaaatgaacttcgttcagactccaacgaaaggctggcgcggtcgtgcgttcctgaacacggaaacgggcgaacttgaactggaagaaaagaaatggcgtgaatcggaaaccaactctattgagttctggaaacctctgttcactcaccagccattccttgatgccattcaggataagtaccgtattcctgacaaagagatcactgacggggcagcactcgaagatctttattctgacgatgaagtagaaccgtcaaataaatttgatctcgatgacgatatccctgatgatgtggatatgtcagaagagtaataaacaactgggggctttgcccccttttaataggtgaatcatggacattgaacaaaaaacaaaaaacattcttgacgaagcaatgcaggacgttattcaagaactgttgatcaacgatgaaaacgatgttgcacacttagtgtacatccataaggtgtattgggataacggcctgaaagtcgaatttagtacgccggacgaagacaaagaaaaactgattccgctggttcacgatgcaatctacgcgcagatcaagcctaatctcccaaagcctgaaaagaccttatgggcggcgttgaaagtaaagctgtataatttctttcagatgttcgctaatctggtttaagaggtaataatgatcgtcgaaacaatattttcaaatctggtttttaatggtacgtattttgttcaggcgtggccccatttacgccgtgaatatttcgaagggaacgcgcagattctctttgatttgatggataagcacgtacaggaattcaacagcattccttcacaaactgctttagaagtagctctggacaaaaagagcctgagtgatgtagtctacgaagataccaaaaagatgatccgcagcatgaaaaatgcgccggaagatctggaatggttgatgaaagaaacggaaacctattgtcgtgacaaggcaatgtatcgcgctctgtcccgtgcaattgagatccaggcgaatgctgaaaaacctgctggcgaacgcaacaacaaaattcctggcgttggggcaatccctgacatcatgacggaagcgttagcgattagcttcgatagttcggtcggtcatgattacttcgaagactatgaaaaacgctggatgctttaccagtccaaagcgatgaagattgctttcaatatcccgatcctgaacgccattaccaaaggcggggcggaacgtggtacactgaacatcttaatggctggtgttaacgttggtaaatctctggggctttgttctctcgctgctgattacctgcaatcaggtaaaaacgtcctgtatatcagtatggaaatggctgaacacgtttgttctaaacgtattgacgctaacctgcttgatgtgccactggacgatatcgacaacgggaacatcacctatgcggactataagaaccgtatggaacgcctcaaacagtcgaaggtcgggcgtttaatcgttaagcaatacccaacagcaggggcgaacgctaaccactttaaagcgctgattaaagagcttaaattgaagaagggtttcgtacctgatgtgattattgttgactacctggggatctgtgcttctacccgtgtacgcggggcggaaaatacatacatcctggttaaagcgattgccgaagaacttcgtggtttggctgttgaaacaaataccgtaatgtggactggtgcgcagactacccgcgccgcgtgggatgcttctgatatcagcatgggcgacgttgccgaatctgctggtcttccggctaccgctgactttatgttagctgtgatcgagactgacgagttagctgatcagggcttgcagttgttcaagcagatcaaatcccgttacggcgataagaaccactttaaccacttcaaactcgaagtgcgtaagggtaatcaacgctggatggataccgacaacagcgatatcgggttcaaatctgattataaaggtcgtcagatgccgaaaactgttgaagaagcacaaggtgctatggtaaaacaagctgagactaaccgaagcaataagttagccgaaattgcaaatagtacagacattcaattttaacggggcttcggcccctccaaaggtatagtgaaatgaaaaagattctcgttattgtattcctgatcctcctgtctctgaaactggcagcaatcggggttatggcaaatgcttcatggtggcttgtgtttgcacctctgatcgtgatcggtgtgattaagctggctttctgggtgctgtttgtggtggcaatggcaaatgtattccctaaactgactctctggattgcaaaaaacgcaaaataatcctgattaggggttgacgggagttatgattgtgataatatgactcccgtagacaacgaaacggattaggagataccaaatgaacttactgaacaacccatacgacaaagtgatgaacccagaactggatttcagcgcgggttatttcgatgcagtagtgaacagcgtagtaaacagaggtttgctggttgaaatgctgaaaagtgggaaagcagatgttgaaggtagcgttgatttcctctggggcttcctcccaatcgacccagaattcaaactctgctgtaacgaagttcaggccaaaaacgttcttcggtatctaatcaacaaagcataaaaattaagccccgaaaggggcttttttgtatctgtaggtattgcaatccttctcgaaaggtgataccttattctaaacaaacaaaggaggacatcatgaaacttgcaatcgcttttatcttactggttctaaacgcacttatgggctttccgttcccgtggttagtgcttctggctatcccgtttgcatggaacctgttcagaatcggtttagcgggttgtgttggtgtcctgatgcttatcatcggcgctatcggtggcaaagacgcttttatcggtgttctgaaagccatgaaagagggcgttaaagaaggtttagtgaaatgagtgatttattagatatgatacttccagacgaagaagaaccgaagttcgatagtccgtatcgttccgaatggatcgtatcggttgacgataaaggctatgtcgatatcatgcgctggcctaatattcatcctggctatctggacgaaggtatcaatgcggaaattctgggtatgcctgaacaggttgaagatcctgctggggtgtataagtggatttgtagcccgtgggaaacccgcgactgggaaagcaatattgttgatgactggggctttgatgtggtagaatctacccctctgttcttattaccggaaaaggtcaatggcgaagttaacgaaagcggaaaccaaacaacacaacaagataatggatctggtggagtctgacaaggcgctaacctacgacgaaaaattattcattatcgaaaacttccatgaaggtgcatttacgaataactctgaactgggcgcgttctttaccccgatcggacttgctcgcgatttcactattgatgcttgtaccagtggaagcgttgttgacctgtgtgcgggtattggtgggctatcgttcgcgatgcttcacatgatgatgtacgccaaaccgcgtgaaatcgtctgtgttgagttaaaccatacatactataagttgggtaagcgtatcgtaccggaagcgacctggattaacgcagacgcattaacgacggagtttgatactctgtttgatatggcgatcagcaatccacctttcgggaagataaagacatccaattttaagggtaagtatacgggcgcggaatttgaatacaaagtgattgaacgtgcttcacagattgcccgtgcgggtacgttcattctcccgcagatgtccgcgaatttccgttactctggacggcgttatttccaacaggacgaatcaacgacaacatcgaaatgcaaaaagtttcttgatgaaactggccttgaaatgcaaccaggttgcggcattgataccggatactatctggaggaatggaaaggcgtgaaaccgatgtgtgaagttgtctgtatggaattccctgaaccggagccagaacccgcgcaaaaccttttcactttcacaatagagtaaagactatgagcgatcaattaatcaaaaacatggatttaacctacagtgtgcgaatgattcgcctactgaaaaagccctggactgaatggacggcttacaagctgggtatcatcgacggtcaaggggaagtaatcaagaacccgaagacgaaggaagaactggaagcatattccccgttccatcgctctgtaagacacatcaaacgccgtttaaacgcggttccttatatgtctgggttcatgaaccttacaagcgcgtatgactcgctacggaaccgctggaacctgaccgagcaagaacatgaagagatcatgatgaacctcccagaacttcgcgaaagactcaacgaagaaatggttgcaggtgattcaggcggaagtgtggataatattgcttcgggtgtgactacaggcgcgatcacgaacaaagggccgaaggttctgggttctacacgtccgcataaacgcaaacgtaaaatcatgaagagtgaagaatgaaaccattaccgccattgaattatcggatctgggttactgcgaacaattacacctggtttcctatccgtatcaagtacatgagcgacacagcgatcgtgtacacgaacgaaagaaaaacatcatcgggtgtcgatattcctagaccttatccgttttataagatattctatgaatggaaaatcactttagacggcacagagaaagaagttagccgatagaggtaaacatgtatcttgatatagagttcgcaactcgtatcatgggatcattaccacaaagcgaaatcgttcgacggggtggggaattcagtatccattcccgttgtccgatttgtggcgactccatgaaggataagcacaaaaaacgtttctggatattcccgtcaaaacgaggcacacacatgatgtgtggttgttttaactgcaactacagcaagccgttttctgtgtttctgaaagactattacccggatgattacacggcgtatttgatggaatctttcaaggatcgtaaagatttaaaacagacgcacgaagaaccgccgaaggaagaaaagaaatatattcctgaattgcagttctgcgaacgtctggacacgttgccagaaaatcaccctatcgttaagtatgttgcaggtcgtcacatacctaaagacaaatatgatcgcctctggtttacgcgtcaatggcaacacctggttaactctgtgaatgcggacgcataccctttaccgaaggatgaaccgcgtttggtgatccctatctttgatgaaaagggtaaaatcgagtcattccagggacgtgccttacgtgacaatgccaacgcaaaatacatgacaatcaaagcatgtgaacactcaacgaaagtgtatggtcaagataccatcgatccgttgaaacctgtctacctgcttgaagggccgctggatagcctgtttgtagataatgctggtgcgattacgggcggacaaatggcgctgtccgatgttccgtataaaaatatgcgtgtctgggttcttgacaatgaagcgagacaccctgatactactcaccgccttttaaaattgattgaggctggcgaaaaggttgtgttgtgggacaaatgcccgtggccgtcaaaagatatcaacgaaatgataaaaacggacggcgcaactaaacttgaaatcatgcagtatttgaaagagaatactgtttctggactcacggcgaaacttcggtttaagtcgtggaacaaatcaccgaaaaaatgagattgatatgactgataaaactcctgtgtttaatagctgtgcgcacctggttaaagccgatgatctggaaatggtagaaggtttctaccgcaatgcattacagaacggaattgacccgctgcaaaagatgctggacttgcaaaaccatgcacaacaaagcctgtctgataccctgaattgggttccacgtccgaacgaactgaaaacgtgcggtgagatcctggactggctgaaactgcaagatgatgcgatcgcagacgaaacccgcgaactttacaccgctctgggtggtatgtcacgcggtgcaaaagcggcttccggtgtctggaaaccgtggaaagcaaatcaccaggaactgcgtagccaggtattcgcagaaatgaaagaagaagacaaactggaaattctgttcgaactgattgaccagtggcacttcttcatgtgtaagttcctcgcactgggactggatgcggaaaccatctacaagctgtatgctctgaaacaggcggaaaacctgcgtcgttgggctaacaactactaatggaactcaccgcgctacatgccgtatttgctttgtcttatatcgtttgcgcggtgataacgtatctcttcggatggtgcgttttccacgttaacggtgttgacagaaaagccgctttgatagtattatcattgctatgggttataggttttttctacgtcatctatgaggggcgaaaatgattgacaaatactatatcattgttacgaaagacaaagacggctttactattccacacgttgaaaacgggaaaacgccggaactgtttgcaactccagcagaagcaaaggataagttagactttatccgcaagtgctacgaaagcaaactcaactacgtaccggacgaaccgcgtttcagtttcttccgcaaaaccgagcaactaccagcaaccgaagaacagaaaaaagagatgcgttggtttattgagaattcgaaaattcaaggggtattactcaaattatgagcgagttaacatttgatgatctgagtgacgatcagaagtccgcgcatgatcgcgtgatccacaacatccagaacgccattcatacaactattacgggtggccctggtgttggtaaaacaacactggttaagtttgtctttaacactctgaaagggttggggattagcggtatttggttaactgccccaacacaccaggctaaaaacgtgttagcagcggctaccggaatggacgcaacaacgattcattctgcattgaagattagccctgtgactaacgaagaactgcgtgtgttcgaacagcagaaaggcaagaaagcgcctgatctgtctacctgtcgcgtgttcgttgttgaagaagtctcgatggttgatatggatctgttccgaatcatccggcgcagtattccaagcaacgctgttattctgggactgggtgataaagatcagatccgtccggtaaacgccgatggacgtgttgaactctccccgttctttgatgaagaaatctttgatgttatccgtatggataaaatcatgcgtcaggcagaagggaacccgattattcaggtttcacgggctgtacgtgatggtaagatgctgaaaccgatgtctgtcggtgatctgggtgtgttccaacatgctaacgctgttgacttcctccgtcagtatttccgccgtgtcaaaacgccggatgacttgatagagaaccgcatgttcgcttacactaacgacaacgtggacaagctgaacgcaacgatccgtaaacacctgtacaaaacaacagaacctttcattctcgatgaagtgatcgtgatgcaggaaccgttagttcaggaaatgcggttgaacgggcaaatcttcaccgagattgtttataacaacaacgaaaaaatccgagtcttagaaatcatcccgcgtcgggaagttatcaaggcggagaagtgcgacgagaagatcgaacttgaattctatcttctgaaaacggtatcgctcgaagaggaaaccgaagcacagattcaggttgttgttgatccggtgatgaaagaccgtctgggtaactatctggcctacgttgcgagcacttataagcgcatcaagcagcaaacaggctataaagccccgtggcattcgttctgggcgattaaaaacaagttccaggatgttaagcctcttccggtttgcacgtaccacaaatcgcaggggagcacgtatgaccatgcgtacatgtacacgcgcgatgcgtatgcgttcgcagattacgatctgtgtaagcagttaatctatgtgggcgtaacccgcgcacgttacaccgttgattatgtataaggggctttgccccttttgaggttattatgaaattgactatccttgtaaaagacattccccgaattcttgaagcactcgataaaattcgagaaaaagatccacatgcggtcaatgtgttcgggatgtatagcgcagcagatccgcaagaagttattcaccgtttgcgcttcattgaaaaatctaacgatattctgtattctccgaacggaccaagttattcatggagtcctattgcaaaagaagtcgaactgacttatgatgaatatggcgttatcgtgctgatccttcgaatggcacgaaacattcgtgaagataaagacatatggacattaatatcatgaaaaaagatatatctatccagatcccacgcctccacgcggaagcgattgcagatctaattttcaaaacccctgttcaagaacttccgcatttcatcgatcgcgatgtgttggacgaattcacagaagctgttgaaaacgcgaaccgtctggaaaaggcaatttatcattccggtctgcgtcagttcggtatgatgactttgcaaagcaaagagtttgaaacttttgatatcaacccagaagttgcgcttacgctggcgtacttcatggaagagtataagcggagaacttcatgagtcatttacccgtagattacgtatgggattatgaaacggttggtccttccccgaatgggaaggtgatcgaactctcatacgttccatttgttgacgatccccacaacccgccaacgttcgcggaactggttgcacgggggcgcaagtacaaatttgatttgcgcaaccagcctgatcgtattgctgatcagggaacaattgcctggtggaaacaacaaagcgaagaagcccgtcaaatcctgaaaccgtcaccggaagacctggaactgtatgcaggacacagacaattctttgaagacctgaaagcggacggtgtgagccgttggcaatcactcgattatgttcgtggccctgaattcgatcgcggtatcctggttgatatcgtgcgtaagatggttggtaagatcgacatcttcgaagatatgccgaccgtgttctggaatagtcgcgatgtgcgtacatgtatcgaaaaccgcctgttaacgcgtgatgcttcgacctgtcctcttcggaaagggttgcttgatggttttgtgatgcataattcaattcacgattgcgcgaaagatgttttgatgatagtctattcattgagatatgcgctggggctggaagaacccccaagtgaagaagaaaccgatccattgagtctgccgaggaaaagatgattaaattatcatttgtaggtaaaactgtacatgcaaaaacactgaacgaagcaaaagcgcagatgtttgacattctcatgaaccccgcgttcgttaaagtcgaatacgatgaatatgttgttcagcctggcgatagcatgtattcaatcgctgaaaaattatacggttgtggtgagcgctggcagtctatcgctaagttgaaccgcaaaaccgttagcaatgcaagctatatccttccgggtatggttctgaaattgcctcaattagtagaattgtgataaaaagcccttgcattcgtgcaggggctttgttattttgtagggactgaaacaaaagaggatgaaacatgtttggtgatttgaaagaaggtttgaacattttaatcggattcgcgataattggtgtgattgcgtgtgtatccggcgcggtgtggttgtcttatcaggcgatcgtgtggttgggtgaatggcttcacattctggcacagtaaggggatattatgcgtttatgtttagttggtgtaggtttcggtcgtgcgttaactcaagggttaatcgactcaatccgctggattcaaccaagcgttgaactgtacgcaatgccgaaccggatcgaatactctgatccgacaccgtacaaaatgaaaccgtatcaagcgccacgcgttaaccgtgtgctacaccgtcaatctgtaaacaggggtaagtgatgaaagagcttacgatcgtcgcagcagttctgattttcatcatagtttcaatgattatcgtcagactgtaccagcacggggaagcgtttgaatggttcctggatcacgacaaagcgtttcgaaagcatttcgctggtgagttcatctttactcatgtaagcgtagcaagcggtacggtaacgtttgattttgacgggaaagggaaatcataccatgttgaactctcccttatggatgctaaacgcgtgtatgatgccacacaaaacggcggtatgcgaaagatgcttatacctctttcaaaataattttaatagcctcttgcaatgcaaggggcttttttgtatattgcgcacataccaaacggaggcaactatgacacgtattaacacaatcgatccttctcttcttctgaacgaacacctgattgcagaactgcgcgaactcccccgcattcccaatgccgttttatccggtaaggcaaaaatcaacctgtcaaaaatccctgctgtgtatacgctgggaaccggacacgtaaccttcttttacaataagctgggataccttcgcgatcgtcatgctgcattacgtgctgaataccttgcgcgtaacggtaaagaatacatggacggtgcatacgaagatttcgatcttagtccgttgtcaaactccctgtttcatcgtcatttgtgcgcggactggcaaccaacgccggaatcagtgaaaatcaatgttgagcgtatccgtgaacgtttcgaactgcgcaaacgtgcttatcggttcggtactgagatcatcaacgacgaagccgcatgggatacgtattacgaaaaattaaaagaaaaatacgattttctttgatttgggtattgacccaaatttcgatatgcagtatattacacacatcgaaacgaaacagacaaaaggaacgcatcatgaaaaacttagaagccaaagtagttaaagccctggttaagaacggtttcaacgaaaacgacgcagtagcgatggttgaaaagaatctgaatgatgcgttgaaagttagaccagaagcaaaacctgctaaactcgcagaggtgattgtatgcatcatgtaaaagtaagcatcaaggatatcacggtgggtgacaccgtgatccacgaagggaaaatgaagactgtcgggaaaaacgacatcaagcgcgaccctttgtttggtgtcctcctgtttggtgatagtttcaatctggggagaacttttatcgagcgggttattttcccgaaatggtatcaagggaaacgggtttaacaaatagcactttttgctaaagacttcacgggatagctttgatatagttatcccatcgaaacaaaacggaaggagagttatcatgatgcagaacggttctttaatcaaaggtcacggcaaattcctgattcagcagatcaacgacaacaaaggcatcatcgcctattgcgacgagaagatgaacagcgatatcgcagcatgggaaaagaaagagtatgcagcagtgaaaaaagccgcagaaaaatcccttgctaaagcagaagaaaatctggctaacctggagaactacgcatgaactacaaaactttcgtgattaccgtcaaaactaaaaatggtgaagactgcttcttgtatcaggcaaaagacgagaaagaagctaaagcaggtgtattgaagttcattaaacgcgatgcattgagcaatatttgcgaacaaccaaaataatgcttgcaatcctgaacgcataatagtatattacacacatcgaaacgaaacacacttaggagattttaccatgtatacttttgacgaactgaaagccgcagcacagcctttactggacgcgatgcacaaaggtcgtaacactggcatgtggttcagcgattacactgaaactgtgttcgttctggaaaaaggccgtaagtatcaccgtatcgtgcaggatacccgcaacaaagaaacgggtgaaatgttcaatcagcgttcagttgctggcttcatcgacaatgacggaaatatcttgaaagccgctggctggaaagcacctgctaagggtattcgtggtaacatcttcaacaacccagagaacgcgatcgaccggagtggatacgttcgctatcttcgctaaaatcggggcttcgtcccctttggaaattaaaatgaaactatcagcaaccgccagttggtcaatcttcggactgatagccgcaggggttttattcttcgcatggcaatcaagagatccgaacaaagcggcgtatgaagccgcacaacgagtagtagaacaggatgcagaagcacaacacgaagcaatgctacaacagcgtcgtgatatgggctttgtggagactgtgagttacacaaacgcttttggtgatgtcactacgcgctctgtaaacgtcttagggcgcacgaaagggacaatgctcaccatcagacgggaaggaaccggaaagctcgtagacgtgtgtttcagtgcgattacggacgattccaaacgcgaactattcgccccgtatttttctacgcctgtatatgctaaatttgacggcggagaaacaaaagagtttagcgcaagcagaggaagtaccgaagatttcctgtgtattacttccccgcaacgcttccttttcaatatggatcgtgctagtgttatgcaagtccagttagtattcctggatcattactccaaagtgccagaagtgcatgaatggaacctgaaaacatataatgaggttgtgaataaatgagcagacgcccaaagaacagcaaaaccgaaatgtttgcaacgtttgatgtaaacggaaagagcattgagggtaaaccatgcacgaactcaaagtttatgcatatcgccggattgcctggtatgagtgttaaaacttcttactgttgtcactacaacgaagaaaccacctctgtttatttgggcgaagaactcatggctgaacgcgtcatgcaatgtgtgcatttccctggcgaacgtccagaagtgaactgttttattgttggttatcataaaggtattgtaaatgagcaagtataaaattggtgatatgtacgccccgaaatctattttaatggctgtgtgtcaaatggcatcagaagccgatccgattcgtcgtatgtatgatgcgttgcgtaagaacccgatggacttcaattcaccacgccggatcagtatggtgtatgaagaaacagggattctttatcttgaaggtattcccgttcctatcaagttcaacgatatgaaagggcttttcaatccggtatgggttgcaccagaaccggaaactgaaatcaaccacgtcaataaaggtgaggaagtaccgcgcgaaaattccgctgtagttctggataagtttttcaagaccgctcatagcgtcaaaaaacgaaccgttagcgacgtggttcaccacctgtccgcagaggttggggagatctccgaatgtctcgttcagcctcaacgcggcggtgatatcgtcgaagaaagcgttgatgcgatcgtgtgtgcgttggatgtgatttacctgaaactgggtactacccacgggacaacagaaatcgcgcaagtgatcaataaactgcttgataagaaattagataagtggtactctacttgtagttaatcaattacgaggatcggatcatgttggtttatcgcgttgaattgaaagcgtctatattatccaaatatgatggatggtgtaagcaattaggcccgtacacgggttgtgttggtgatgaagacgatctctatgagtatcttgatattcatggaatcgagttcggtttaaacttcggtatctccgagactcgtcaccccgcaccatgcgaagaccttcgtttaatgcgtaacctcaaaaaacatggtaaaaattatcgtagctatattttcggcttctcttcattgcagaagttgtctaaatggttcgatagctgggagcggcaaattttggagaatcagggatatatctgtatggtgtacgaaactgatctcatgtttgcagggaacaaacaatgtgttttcagcaaagccgcaaccccgatccgttttattccattgtcagagatttattaatgccaacatatacctataaatgcaccaagtgcgaaaaagaattcccgaagatgtccagcatcgcgagccgtgacgaaccgaaagattgtgattgcgggggcgaggcgaaacgaacggttgataagccgcagatggtgaaagacggtttcccgtacaacaagtaaaccccgaaaggggttttctttttcatagaaccctatataatgcctgagaactaataaagaggtgaatatgagtttagatttcttaatggacgataacgagccgcagaaagcaccagaagccccgacaaagggcgctaaggtggatgaatcattctgcttgagcgatcgcgatcacattcgcaaacgtccgaacatgtacgtgggttcagtgaacaaagaagcccatgaacgttttatcatgggtaaattccgcaaagtggaatacgttgaagggttggtgaaaatcatcaacgaaatcctggataactccatcgacgaagcgatccgaactgatttcaaatttgcgaacaaaatcgaagtcaagattgatcacaatctggttactatttcggacaacgggcgcggtattccacaagatgacgtgagaacgccagaagggaagattgttcctaaacctgttgcagcctggacaatggctaaatccggttctaacttcgatgacgaaaaccgtgtaacaatggggatgaacggtgttggttctttcctgacaaactgttacagcgcaatctttatcggtgagacatccaacggtaaacgcaaagtcacgatcaactgtacggacggagcgcagaacatggattaccgcaccagcccgacgaaggagcaagggacaaccgttaagtttacccctgacttctctattttcggtgtggacggtatcgacgaagagacaaaggaagtcatcaaagatcgccttatggcgcttgcagtggctttccctgccgttaaattcacatataacggtgatatcctcccgaacaaattcgcgatgtatggcgcgatgtacggtgataaaacgattacccagacaaacaacaaaatcagtttcatcctggcgagcacagaagacggtttcaaacagaaatccttcgttaacggattggatacgaaaaacggcggtgttcatgttgacaccatgatcgacggtatctattccgaactcgaaccgatgatcaagaaaacacacgctatcgagatcccgaaagcccgtgtaaaagaatgcttgactttggttgtgtttttgcataacttcaatgcaccagcttttgatagtcagacgaaagaaaaactgactaacaccgctggggagttcaacaaccacgccggactgaactacaaaaagatcgcgaaacagattatggatacttctgaaataatcactccgatcattgagtccgctctgattcgcaaacaggcagcagaagccgcagccattaccaaagcgaagaagaaagcgaaaaaggcgaaggttgcaaaacatgttccggcatcagggatcgacactgacggggtagaaaccactttgtttctgaccgagggcgattccgctgtagggcagtttatcgagtgcagaaacgaagagacacaaggcgcatttccgctacgtggcaaaccgttgaacacctggggaatgagtaacttagaagtgctcaaaaacaaagaattgtctgaactcatggcgatcctgaatctccatccaggcgactcttccgaaatgacttacgacaacatcgggatcatggtcgatgcggacgttgatgggggcgatattctcaccctactgattgcgttctttagtcgctggcctgagttgttcgagaagaaaaagatccgttatatccgcacaccgattatcattgcgaaagtcggtaaagatgaaaaatggttctactcccttgaagatttcgcaccgttccgcgataaagcgaaagaggtacgatatatcaaagggctgggttctttacgcaaagaagattacgatcgggtgttgggcgaccagttaaaatacgatacaatcgtactgggcgacgaatacaaagacgttctggaactgtgtttcggtgatgaatccgatccgcgtaaagactgggtgaacggaaaacataaattttcggtgaaatgatggaaagaagtattaaagacgttgtacaggtagaagggcttacgtttgccctttacacaatttattctcgtgcgatcccgcacctggtagacgggttcaaacccgttcaccgtttcttcgtgcattccgcagcgaaaggcggtacaggcttccagaaagtagcctctatcgctggcggtgttgcaatgtatggttatcaccacggggaaacatccgttgaagaggcattgtctcttatggcggcgcactggtgcaataacatcccgctttttgaccgcgatgggttctttggttcccgtctggttaaaaagccaggcgcaccgcgttacattaaatgtaagctgtctccgctgttcaaggctatctacatggatgaagatttgacaatcccgcatgaagatcctgaacacgtaccgccagcctattacctgccaatcattccgatggtactggttaacgggttcagcgggatcgcgaaagcatacgctaccaacattccaccacacgatccgatttcggttctgaatggatgtgttagttacctgaacgggaaagatttcacgctggatctgaaatacccgcatttcaaaggcgacattgaaaacggtacgatgtacggcaagtacgaactccagggtaaaaccaaactggtgatcacagagattccggtcaagtatgatcgcgtgaaatatatctctattctggataagctggaagaaaaagggtatatcgtaagctataaggatctatcgaaagaagatttccgctacgagatcaccctcaaacgcgagtatgcaaacgggcttacccctgagaagatcctgaaagatttcggattgattgagaactcaaacccaaacatcaacgttatctttaacgggaaactgcattcatacgagcgtcctgaaacgttgctgaaagacttcgttgatatccgtattggtgtttaccaacagcgtattgataaacgcatccaggagactaaggaagcgttagataaagcgctggcgaaggttgacttcatcgaccagatgatcgcacagcctgacgcattgaaggggcttagtcgcagcgaagcggttaaacttgtctctacgtggacgggttgcgagaaccacgccgaaatcctggttgcgatgaacatctatcatctaaccacggatgaacgtcaaaagctggaagacgaagcgaacgaactgcgtaagcaactgaaatactgggaagaaacgaccccgaaaactgaatatctcaatgatttgaaagaactttcgaagaaattgaaataatttacaaaaagcctcttgcattgcgggaggcttttttgttatagtgtcctcactgattggggaggatataaaatgttcaaaactcgtagcgatatggaaataaccatctgggccaaaagcatcatggcgaagcatggcttatctcattggtctttcaaaattaacggacgtttcaagcgtactctgggacaatgcaattacagtcgcaagtcaattgaattaagccgttctcacgttaaggaagatatctacgagaacgttttagatactctcatgcacgaaattgcacatgctctgaccgaaggggctggacacgggatcgtatggcagcgtaaagctatcgagttgggcgcacagcctacaccatgtaaaagccgtatccgtgagaaatcagtgattcgggaaagcaaaaaggatatgtatgctttgttcctgaaaactccgaacggcgaagtttatcagtgcaatatgcctgaaaagatgtacaatgagatccaggaaggtaaacgcaaccttgcgaacatctacatttcaggaaacaaaagagcaaccaaagggcgcttagtagcgcgtaaattgacaccagaacaatatgcagaggcgattcaatgaaaccatatgatgcaccaaaaacgggaaaatatattacaatagctgtgctgtgtactattgcaatatgttttgtaactgctatcgtggtcggtatcatggatatgaaagaccgcgaacgtcagaagcaacaggtttacgaataccttgaccggatgtgtacacctgttgaatatgggcttgatcaaaagcctgtgaaatattcatgcgataacatcatctttaacaccaagtgagatataaacaatgaaattgcgtcagttagcaccacaaaccattcacactacgggcttcgataaaggcgaacgcacgaagtttaaaatggctaccagtgcgaaaacatacaaaatcatgtcatcaaccatttacaaatacaagatccgcgcaatcattcgcgaaatctccagtaacgccattgatggtcatatggtagcgggtaacatgaacccgttcgatgttcagttaccaactgttctcgatccgcgtttcatcgtccgtgattacggcacagggttaagtgactggatggttaaagaggtgtttgcaacctatttcgaatccaccaaaaccgacaccgacgaactgatcggggcgctgggactgggtagtaaatccccgttctgctacaccgaaacattcactatcgaatccatccaggacggcgttaaacgtgcgtacacggcttatatggataatggtgaacctttcgttgaccaaatctacgaaaccgaaacagacgaacctaacggcgttcaaatcaccgttccggttaaagtcgaagatatcgcagaatgggaacgtgaagcggcgcgtgtttatgaaccgtttacgggtatccgtccgcgctttatcggtgttcaggttgatgtaaactggcaaccgaaagaagcagacgatcgcgggatcatccgttataagtccatcaactattcaggcgtatacgcgcgtatgggtaacatttgttatccaatcgatctggatatgttcgaaaactcgctgttctactgctaccgtaacagcaattacgcatatattctggatttccctctgggatcgctggacttcatgccgtcgcgtgaagagttgagccttgataaagtcacgaagaaagtgattacggatcgactggataaaatcaacaaacgctttgatgaagagttgatggaacagtataaaaagcagaagacaacccgcgataaactcgtatggttcaataatctgcctagcttgttacagacattcgtaacccgtgataaccgtttccgtgtgggtaaagaatcgctggctgaaattctgacgcgtatcaaaagccctgatacagcaaccggaaaatatgtgtggggcttctgggctaacccatatgacgggaaagattgcgtattcgaacgtgtgggttctggtcgccgttatgagaagtataaagcggaaaccaccaaacgccaggacgttatgcgcatgatccaaccgtggcgacagaagaaactgttcatcgttgaaaatgataacgaagcgcgttcactccgcccgtatctgatcggttactgcatgatgaacggttcggatcgtatcagtttcgtaactgccgatcgtaaaagtgactctgtgcgtcagttgattgaaactggctatttcgatgaatctgagatcgttacactgaaaaccagtgaattgaccaaagaattcgaaacgtacaccgaagatcgcaatcgctggaaagcaacgcgtgaatcatcttctggtgattctgaaccacgtccgaaaacgcctacggcatatcattacttccttgatgatcagggtaacttacagaaaaacgatctgttcctgacaaaagcacagttcgtgaaactggatgaaatgtacgctatgcgcctctacgggattgatgaatatagccgactggacggagaagcaccgaactatacactgggtagcatcgccagcagtatgatgaccctgttgaaagttaccggactgaaaggcgtgatggttctgcgaaactccctgtggagccgcattcctgatagcaacatgaaatgtcttgatgactatctggtacagcgttttgccgacgcggtgaaaaagatgaagcctaactggtatccagcctggatttcgtctaaacatggtagcgaggttcgaacccttcgcgattatctggaggtgactcttgatcgcatggtgaaaaaccgctataatccagaattgtatttgttgcttgattatcttgatggtaagtttacctacgatactatcgagaacaaaaacaaatcgaaaaatgtggtgcgcaatccgttacttcgtgaaatgtcggtgaagcattacaaaatgctgaaagatatgaaagaacgtgttgataccgcctttgatttgtttgaagaacgcaaccctgcattggtgtatgtgttgcgcaattcgtcttactctttaggccgtaccatgattacggacgataagatcaagacgaacctgattaaccttatacggtggaaataatgagaaacgttaagatccttgatgatgtacaaaagaaagctgtctatgagggctttctgaccagcgcgaacaaaaccgcactggctaaacaatttggtgtaagcgtccgaaccatcgggcgcgttattaccgaacaacattctaagtataatacggaagcatcgaaaccacttccacaaacagatgtcaaatctaaaatgattggttctgaatcgttcattactctggtactggacggcaagatcatcacagcggattcgtcacaccctaacttcgaaaaagcacatgctttaatggttaagggcgacatcgagggagttgctaccctgttggacacaacgcaagcgttgaagatttacagcaaaggcaacattaaaatcatcgggcataaagtcctgtacaaagatatcgtgtttgacagcggtatcacacaacgtatcgttcgcgaaatgtacaacgatcgcccttacgagcacctggtgaacttcttcgagaagttgatggaaaacccttcacgcgatgctgtgtatcagctttacgggttcatggtgcataacgatatcgaactggcagatgatggagatttctacgcgtggaaacgtgttcgtgaagacttccgcgatctggcttccggtaagttcgataattcccctggtgttgtggttgaaatgccacgtaaccaggtagacgagaataaaaaccgaacctgttcatgcggtttgcatgttgccgcaaaatcgtacctgcctcactatggcggaggacgcgggaaagttattcaggtcaaggttaatcctcgcgatgttgtagcaatcccgacagattacgacaacgctaagatgcgtgtatgccgttatcaggtgatgcgtgatgtaactgtgggattcagtcactactaaccccaaaacagcgcctggagcgattcaggcgcggaggattcgattatgaaattcctacagagcattcctgactactggcagaacttgagcggggcagaaacagccattaaaaccgccaaagaactctggaacggaggcaacgttaccgctggacgtacagaagacggagaacagacatacttcaaaaaaccttacggtattatcgcaacagcccttgcatttaatctgggttatgttatgctggtactcgcaacggttcagaagtgggtagagataccgatgaaatggatcgggacgttgttgattcgcttagttcgcttagtgttcggcgcaacgatcttgattttgtcatgccctatcttcttgctggtactgacaatgaatatgaaaactggtgtaaacaccaaattaggaaataaactggtgaagaaaaatgaaaagaattctgacaaggcttgacatccacaaatatgctgttaagataggtgacatgaagcgcggtgacttcaccaagttcgaaggggttgacctgaaagaacacggcttctacctggtagttgatgataaaacgggtaaggtagtatttcgattctacgtagccccaaatcaacgccgtaagactggcgcaaaccgtactctgttacgcatcaaacgccgcgaacatgaaccatcagcgatggtggccttgctggatagtgcttctctgtacttcgttgcacacgataagattaaaaacctctttggtttctcgaatcttactggtacaatagcggaaagcgcgattcagatgcggttcggggatggtgagaactatactgaatacaaccgcgcactaaatgatctgtttgactttgaattccaaccatactaattgagataatgaatatgaaactgttttccaaaatccgttctgtagacgaaatcgtagcaacttttgacaaaaccctgaccgaactcgaagcgcgtattgcgcatgatcagaagcaggtcgaacaggtagcagcagaccgcaaagcagcggaagaagaacatcagcgtaagctggctgaactggctaccaaagaaagcgatcacaccgcaagcgcaacccgcgccggacgtatcgcggataagatccgcaaactgctggattaattcgaggggcgaaagccccttaaatatttctttttgaggggctttaaatgaacaatctggtagcaaaacatgatttcaaccgcgcttctactcaccgcgatcgcaagcgagcacttaaagaagcaaaacgtaagcagaaacataaaggtaagtgtgatgaaaaccgctttgattattcttgaggaaatcccagaaaacacggggctgtatctcgttgaagccgacgaagatatcattgaaatcctcaaaaccgctcacgggcattatgtgaacggatgcaacaacaccccagaacaggatcacgctgtcaatatcgttaacctcatgttagggccgcgtacagacgacaacctgaaatgggcgagcgaatccaacgttcctcatgagtatgtcgggatgtattatcagtgcaacgttgacgataaagcgccactgataccggaaaaacagattgatttagtagttcgaacaggtttcttcttatgagttcacaaattctgttcagcaaagaagatccattaggcacagattcatcggtgcaacgcttattctggcacatggattatgcaaaaaatcgttgtcgtaacccaaacaatacatggggaagcaacgaagacattgataaagcaaaaatttatcctcgcggaaaagcatactggaaaatttttgatatccatcttcataaagttatgaaagattcgaacgcatgataaaaaagcccttgacttcggttgagggcttttgctatattggccttgtcgaaacgaaaccactaaggagattcaccatgactaacctgactaaagttaccgcgacatacttcatttcttctggcgctaaaaacgctatgtacactctgcgtgtagagcgtcgtggaggtggattcacttctgataactatatctgcaacctgtctactgacccagataaagcggaagcgaaagcgcgtgaatacttcgatcgcatggtggatcgtctgaaccagaccgatactttccagatggtgttccagggcttcgcagatttcgatctgttcgaacgtcgcggcaaactgtctgtacaagataccgaaaatctggaactgctggaacaaggcatcatgccgatcggtaagcgtaaaggtgaagtgattgctgatatgccgatgtatacgattctgtggtgggctgatcagtgcaaagaaaacggcaacgatagcccagtatttcaggctatttgctcttactgcatgggcgtagcgctggagaaggattacatcgctaaacgtgaagagatccgcgcagaatgggaagcagagcgccaggcgaagatcgcagcagcgcagcacatcggggaaatcggtaagcgtatggaaatgagcggggttgttgagaaagtgatttctctcggatatacccaagtttcttattacaccgaagtggaacgtttcatgaccaaaatcaacgtagatggtaacgtggttatctactacggaaacaaaattgttgaagagggtgatgtgattcgcttcaaagcgacacctaaacttcacaacgaatacaaagaagttaaacaaacaatcgttcagcgagtaaaggtattataatgacatacgaagaaatgcttaatgaagtgtgcgcgggtaaaaccgcgtaccgcccgattaacccagatatgatcgtgttccgcgaaggggatacgatcattcgccgttctcaccgtaaggttgagattaaccaggtattcattgccagtgttgaagaacagaaagcgaccgactgggatatagttgcagaagatgataaccacgacgaacttgacctgatcttagtcatagataatcacccactgggtgttcgtccatacatctatcacaatcaatacagaggcgaagtgattctatcatgacacacgacgaagccatgaaagccgctacacgcggttttaaagtcgcccctgtgggtaaggctgggttctttgtatatcacagcgtagaggctggtttccggcgcattacgataggtaatgttggatactggaacgatgaatatgttccgacaccttacgaactcatgcgcgtatgggacatatacgataaaagcccgatgacgaaagtaaaagatttcatcaatcgggctttgagtagtttgaaactgaaattatcatcgaatcctgcctaaaattctagcggcctgattgcacacgatcattaacttcgtatcggcgacttcgggcttctgtatataccattccattagaattgatcctgaatagtagttttcgagattgaagtaaggacaactaaaggtatatgctaccggaacaaggtcttttgttggaagatacgggctggcaatatctgagatatagtacagcccgtttatatgtctattatactcttccgatgtcttgtctataggatagccacccagatttttcgggttaatctgttgcggtaacttcccttcatacgcaattatatcaacaaaataattgacattcttaggtctgaacccaaagattgccgaaaaatccgcacccgtagttaaatgcactatgtttaactgttcgatggatgcggattcaaacttttttgccttttcaatctccatcgtcggcacgtctataacgcttgaagatgttttccagactgaaaataagtcatcccacttataccatgttacgaacataatgaaaatagtgacgataagaaccaatttaatgaataactgtttccatgttttgaccgccatgatgaacgatattacccgttcaagcaccgccaatttatcttgtaatagcgccatatttaatcctcaagttcggggatgccgaccccgaacatatttaggaatttacttaacgttgagtgaccagaccggatcgtgtttggcctacacgggcgttcaaatagtcataccacgcgttatgttgggcagaagcaatctgatattggcgatatccatcctgtatacgaccgttattgtcaaagtcaaacacaccgccgtcatccatcgtaagtcttaggttaacagcaggaccgttttgaatggtaattacgctaatctcattgctgaattgtgcagaaacacaagtaccgaatgcgttgccgttaaaactaccaccaactgcgccgtgaccggaaggtttcgaatatggtgaataccaaccaaccccccactgaccacgataacgggcgttgttatagtaacgctcatacaccgtaaagttgatgttatatacggattgtcccgccattcgagacatataaaacggtgttccgattcgaaccgcgttacccgcagcagacatccaccgttgccctgtttctgtgaccgcagacgaaccgatccagccaggaactcctacaatagccataaaaatacctcatgaaagaggggcaattaagcccctaatttgttttcgattgcttccagacgttcacgcagttcgttgattgcgttaaccagaagcgcgttaattcccgaaggtgaaatggttaacataccagtgtcgatgtcttcgcgcactgcttccggcaataccttctcaacgtcctgagcgatcagaccggattcgcgatggtatacgatatcatcagcatcttttgattgcttatcgtagatataacctttaagctgttcaatcttgcttaatgaatctttcaattcaaccaaattagatttcagtcgaatatcggaacgaatatacacatcgttggcgtttacgttaccttcaacatacagaccacggttcatatacagatccgaagtacgcaactgtaaggtcgtattcagtcggtagttgtgtaccgatacgttatcatcagcaccaccaaacccgaagtatgcgccgctgttacctgccaaagtaatcagcaaataacacgattggttagtcgctgtgttattcagaagtaatgctggcccgttaacaccctgaacctgtaactgtttatagttagcagttgcaccagtagtccatcgcataatacgctggctatttgcataggcgttgagaataccgtcaccttcctgtttgaaacctgtatcgttatcacccagagaaataccagtcgtacccaatccgtttggcgtaccacaaccaataccgtttgtttcgaccgttccgttgaagtttaccgcgttgccaaagttaacagaaccgttaatgttcgcgccgtttcctatagaaacaataccagtagtcaagctgatagtaatcgggcgtaaactgttccatgttccataaggatcgccggagttggtgatcaaggtatagtagttaccaccatcatttcggtgtattaccccgtagtttccttgtaccgcgcggaactgtccaccagaaccagacgtagcgctttgaacttcgttacggaatcgagcataacccgcagtagaaatctgcaattcttcctgtccgtctgtagaacctgttgccagtctccacacaccaccctgaacagtttcatgccagattgtgtccgcgttaccgcctcggaactgacgcaaatagtttttcccgccctgtccaacagtaggcaagaaatattgcgctggcgtaccctggggaacatcattataatatgatggaacgtttacgttaaaacctaatttggtgttaatatacgttacaccagtaccacggaaataatggttatatcgtccgttgctgtctttatagcctaagtgggtaacaccatcaccaaccccgtttccatcaccgtttgtagttactcgaagtattgcagtgtttgctccttgagtagcataatcagtttcaacggaagcacggttattgaatatacccataccgttaaacgtagcctgtccaggaacggttagatggttagcgagaactaaagttccatcagaagcaaaacgagttgcatacgcaccaccaccagtacgaacataaacgttcttccctgtatcaacgtagaccaaacccagttcattacctccagcatcctggaaatataagtttctgtttccatcgcctttgatagacatttgcgtaccaaagatcgtaccgcttacaacagtttgcatcccgatgttgaattgcgtccctgttaaactaacaagaccattatcacccagcatttgcaattcagcgcgaatggtcccagcagcaccagttgtcgtgtttggtgcgccaaaagcacggatataataagcaccacccacccgcagggcgttgggtacaaatcagatcaacaaggtttgcccccaagtttggatctgacgttggtgacgcggtttttgaatgtataacaaatgtgcgtgtttctgcgctaggaaacccgtttgttactgggttattgtctgtgcgagttgcaacgagataaggttctgttgccctaaccattgcgatcctgtatggtaatttcaattcagttgcagaaccttgtaattccaaagttccttgcattgtatcaccagctttcttcacctgtgcatcgtttgttacgttgcctaatccgatttctgcctttgttggcttatcgttttcggtgtagactttaaagcctttatatgtgattgtgtttccagaagggagtaaaggcaaattagcctgactccagatagtattaccgccaacggtagtacccgcttttaaatctgccattattaagatcctcaaatgcttttatgatatttataaaaagaaaaagccccgaagggcttttaattagcgggatttgagttccctgacttcctcgcggagttctttaatcgcgttgacaagcaaggcaataacagcagaagacgaaacagttaagatctcgttctgttcaccatcaacgcctttcttaacagcttccggtaatacttcttgcagttgttgtgcgactaaaccagcctcacgggtagtttcttcacccccgatatgatttgctttgtcgtacaccataccatcaagtaaatcaactttatccaatgcattttcaatcttactgaaattacttttcagtctttcatcagaacgaatatacacatcgttaaagctaccattaccgttcattatcatttgaatgccggatgaagggttgcgttcaaaataaaccagatatgacgatgaatccgacagttctatacggtttccgcgagtagcatcaccagcatggaagatatacatatcgcgagggtttgcaccactgcgaataaattcaacgcgtccgttgccgctaccgtttaatgttaaatttccattgtcaatataactgcttgactggctgatacgtccgttgactgataacgtatgtcccatcgagacattaccagtatcattatttatatacaaaggacgtaggttattataacttccccatgcatcacctgagtttgttaacatgaaataggtgttaccaccgtcatttcggataaagaatccacggttattgtatgcaatacgcaatccgttggctgagttggaaataatatcaccataagatacaaactcaccagagttatcaaaataccattgacgatctaccgatccagtacggtaatggactgtaaacctgttggtgtttaccaacgtacccatagaccacgcaccgccagcctgagaataatattgcttaataataggccagtattcagatgtcgatgtagtgttaatattctggaaaatcggagcttttgcagtgctttgagaagcccaagaacctctaccttcccccgatgcatcaaaataaccgcctgtttggttgatggttcctgttaccgtgcctcctgtatttttcaagaacagtgcatcgatccatcctgaaaacccgcttttgttgatatacacgttcc

SEQ ID NO: 32 - DNA, 178448 bp, Unknown
  source: /note="Description of Unknown: KP2W-M0104 Bacteriophage sequence"
aaagatgggacgatgaatttaaatgaacacaggttatatcttaatgtgtgttgtggttgtgatcgcggggctggctgtgctggcttaccgccactatacaggtgatgaaaatgattattaaagaaatcaaagggaacgctgtagagttgttcctgaaacgaaaagtacacttgattcatgggtgtaactgttattgcaacatgggcgcgggtattgctaaagaagtgaagcacaaaatccctggtgcgttcaaaattgatgcactgactatgaaaggcgatcagcggaagttaggcactaactccatctacatgacggaagaaggtcagattgtcttcaatgcatacactcagtttaaattctggggtactggcccacaagtggattatgatgcaatccggtcatgctttgtgagcgcagtagaacgcgccagggcgtttcctgagaaattgcctatcattacccctcttatcggtgcggggcttgctgggggcgattggctgcgtattagcgccattattgacgagtgtacgggagattacccgatcatcgtcgttcacttcgatccatcggttgatccacgtaaggcggatttatcatgattgatcctatcaaagcaggtcgggcgatcaagaaagcgaacaaacggatcgccgcaatcaaaggacaacgcgccgcactggtgaaaacctgtgaagcgctggcgcagtccatgaaagcgaacaaaatcaacatcacacagcgtaaaacggtggttgacattctttgtcttgttgatgaaggactggataaagaaatgggcgaactgaaaagcaaaatcaacatgtggtatcttgatatccataaagcacaagatagcgaaatgggcggttataatcatgactgacaaaatcaaagctaaagcaatgaaggtgattgcgacatacggaacactccgttggtgtaacgcgcaggtgtgcgggtgtatgggttgtgcaaatcataccatgacgaaagaagagtatgatattgctatccagatgccggaaatcaaagagcatcttgcgcgacgtaacaaaaaactcatgggtaacgggtggtttacaattggctaacgcacacattatagaaaaagttcgttgtcgggattgtcatttccctttgatttgcgtcatgaacattgacaaacccccttacgacgagtgggattggtggatatactgttcaaacaaaacatgcaaaaaccatgaaggtgagggtaaattccagaatcatattaagtttgtggagcgtgtcaatggctaaactgtattatcactatgcatccatgaacgctggaaagagtgcgcgactattgacggacgcgcacaattacaaagaacgcggtatgcgtgttgtaatctataagccagcaatcgacacccgcacatcaaacacagtgagttcgcgtatcgggctgaacgaaaagtgtgaattgattgcgcctgatatggatctgttctgggacattcagcgccggaataaaattgcttgcatcttcgttgacgaggcgcaattcctttcgaagaaaaacgttttcgatctgtgtcgcgttgttgatgaactcgaaatccctgtaatggcttacggtctgcgtactgatttccagttgaatctgttcgagggttcttactggttgctggcctgggcagacgagatccgagaactgcggggaatgtgtcactgtgggcgtaaagcaactacggttgcacgtatcgacgcacaaggcaacttcgtaaccgaaggggagcaggttgagatcggagccgaagacaaatacgtttcgctctgtcgcaaacattatcacgaaaaacttcttgataatgttggtctgaactgttaaggtgtattcagacaaacaaaggagaacactatgagccgtacttaccgtaagaaatatgttccagtccgtgataagtcttctatcgaacagatcgaagagacaaaagcattttcacagtattatgcacagcacggggaaagtcctgatggtattcgttggtactcaaccaactggaaacacaaatcaggttgcgcatatatccgattcgataaaaacctgaatcgtgacggtaacaaagctcatggtgatatctccgcgatgctttcgatcgcagtcaaaaagattgattcgaaagtacgcgctaaaatgcgtcaggagttacgccggatgaaagctggcgtgattggatgggatgaaaatatcgagaacgcaaataagatccgcgcttttgagcgtagcttatgctggtatgagataacttgatgtatttttagactaattttacataaggggcgaatcgccccttttttgctataaatatatacaggaacggatctattgttgatccgtgtgtacgtagagaaatgtttatgaacattaaacgcatatcacaagcgatgatgtttggattgttaatcttgtctcctgcatcacatgctgatcgaaatactgtcgtcccgaaagagttcgactattacatcaatgcagcgctacaggtctatcttgacacaatccctcccagtgtaaataccagtgaattgttctataactatatggaacgaaaatggcagcaaaaacaatgccgcactgaaccagaatgtaaacacctgggctatagggtggcaaacgaatttgctactattcatcgttcgtaagggatgaaagatgcaaacatttaacgaagtaacagatcgtgataactcaagcaaagtagatgcctttatcggtatgtgtctgatgtctgtaacatacatgcatagcgcacactttgcgaccggatcgtattctcaacataaagcgtttgagagtttttacgaagatatgcaggatttggttgataaattcaccgaaattcatattggtatcactggtcgatataaacccgtattaaaaacagaaaatgtgcttgacacggtggtgtatctccgtaaaatagcaaccgaagccgacacaatctatgattcagtagatagttcattgaagaacattctggacgagatcaaaggcttgtgctatcaaacgatttacaagctgacaaaactttcttaaaaagagtttgacacgcgaaaaagtgatgatagaataactatcgaattgaaacataaacccaatggaaataatgatgaacttaaacactatcgtaaacaacccaaagaaaaccactctgatcgctctgggcgtaatcgctgcactgtggctggttccgaactcgtacactatcgttcaggatggtacggtaaaaactcaaaccttcatgggtaaagtttcaccgaagcctgttctgcctggcttccacctggtaaacccactggctgatttcgaggtattcaacaccaaagacatcgcaatgaagtttgacaaattgcaggttccgtcccaggataaattcaaatccactgtggatatgaccgtgatgttgcagttcgatggtaacaaagccccgatcaaccgtatcaacgcgggtaatcaggatcaggcgcttgataagtacgtgaccgaaaaacttctgtctaccgtccgtgagttcggtaaatctgtaccgaaagcacaggatctgtataacgcagaagttcaaagccagctacagatcgcaattcagcaggaagttgaagagtatgcccgtccttacggttacaccgtgaaacaggtattcttgcaggacatcgacctgccggaagcgattaagaaacaggttgaaaacacgaaaattcgtgaagaacaggtgaacgcagaaaaagcagaactggcacgtaaagagcaaatcgctcaacaggcagttgttcaggcaattgccgataaagaagcccgtagcaatgctgcacaggctaacgagcgtgatgctgatgcccgtctgtatgcggctaagaaagaagccgaagcgaacgccgtgttgcagcgtaccattacaccagaaatgattcgctggaaagaacttgacgttcagatgaaacgcgcagagaaataccagggcggtgttccacataccgtaatgggtgcgggttacgatggacaagtgattttcgattctcgtaaataaggttttaaagcccccactctgggggcttgactcctaaaacgagaatactataatgaacataaaacagatcatccttactatcttcatttcgctattcttcggctttattggcggttttcttggtgtattggtgattgcgtctgttttatgattaacctttaaacgtggagcacgttatgaaacaatttgataaagctgtcgtaattggcagattccaacccttccataatggtcatgcagcaatggtgcgtaaagcactcgaagaagcaaagatcgtttacatccttctgggttcagcatatgcttaccctaacgttttaaaccctctgacagcgcgtgagcgtcaaacgatgatcttctcatggttaaacgctaacttcccgatcgaagatgttgttcgtgttcagtttgaacatattccagattatctttacaacgaagagaaatggaaaacctctgttcgtactgctatcagggaaaccaaaggcgacaaaatcgctatctacggttacgaaaaagatgcgggttcatactggcttaaagcgttcggatggacacacgtacctgttgatcctgttcaggttgacggcaaggatctatcagcaaccgatctgcgtccgattatcttcaaccacaaaaacggatgggataagaaactgttgcgctttgttcctcaagcaaccgtcgattatatcgacaaatggatgatggaagacacgttctggcgtttattctacgaatatgagaaatgggaaagcgaattggagaaattcaaaaactacccataccccgacgcgctgaactgctgcacgggtgatagtgtggttgtgtgtaacaatcacctgctggtaattcgtcgtaagttcgcaccaggtaaagacgcgttagcccttcctggtggacacaaaaacgcaaatgaaacgttcctggattgtgcaatccgcgaactgctcgaagaggtacgaatcaaggttcctgaaaaggttattcgtggttcaatccgtaattcgatgctgttcgatcatccgaaacgttccgtatacttctcaaaaccgactgtggcgcagtacatcaagttagaacctaacaatgatggaagtctgccccgtattatgggcggttctgacgatgcgttagacgcgttctggatgcctatgcacgaagtcaaacaaaatcgtggtgagttcttcgatgaccactatcagattatcgtagcgtttacgggactctgataaaagatgaaaaaagcccttgcgttcgcgtgagggcttttgttatattaggggcatcgaaacgaaggaggtaattatgagcaagaaatcagaagtagccgaaatcagaaaactcgatgatggtaaaatcgcggtacgttggaaaggcaatcgcaagttcaatgtgattgaagatcccgaagtcgctgctttcctggtgttcatgattacccagaaagatacattcgttcctgatccaaacaatataaggctggctgattgatgaaacacccttactgtttagtaacccgtcctatctgcgcgggtggtttacctgtcaactgctggcagttgattcaaacaggtgacgcgttcctgaataagcgcggtgataaagtgttcgtctatggcgtggattccatcgaaaatgaaacgatggtgatcaccgacgagaaaacaaaagaaaaatatacgttgacttctgatcacgattgccgtaactttaacgtgtactggaaatctaatgaagactttgaaggaattaaatcatgaaagtagcaacccttagcgggatcactgatgtaaaatgtcgtatggcgctggaacctggtaatcgtgttcacattgcgatgtcgggtattccgggtcaaatgcaattcacgctgcaatctgttgcccgtgataagaacgatatggtttacgtgttcgtcactgaaccatcacgatacaaaacaagttcaacgctgatcctgaaaatgggaaccgctgatccagcaatgttgattgcgggaaccgtagaatctgtccgagtgacacaaatcctgttgaaaggcgcggaatgtaccccagacggtaacggcaaactgtcctatgaagggactaaacgccaaagtgttgatcgtcctgttgtagttggtgacatcttcacgtcagaacgccgtgaataccacgttgaatacatcgcacaagatggttctctggtttgtcgcatgtactcccgtaagagcgcagacgataacaaatacatgggattgactatcattgatggacgtgatgcgatcctgctggattccctgaatgttaaaattaagtttgcatactcatgattcacacaattagcgttattatgggtgatgtcgtaaacatcaacggacacgattactacgtagcggaaatcaatacaaagggtaatcgtgagatcctggaactggacatcgtaaggccgtccgaagggcaatcccttacaatcgaagtagttcataacacgaacacaggggaagacgtagtgaagccagttctggcacgtcttccggtgttctactgtgaaaagtcaaaacgttggaaaatgaaatgatagatttaactgatgtgaaagtgggtgataccctttttgatcctggtattcgtcgatacagtcatcacaacaccccacgaccgcgcaccctgcatgtgatcaaggttgcccgtcaatatctgtatgcgtcggaagatccgaatattaccgatatcaaagatttccgtgttgagcgactggatcgaaaaactggtagcgctaatgactggaataaccatacacagggttatcacagcgaagacgaatacaaagaacatttgtaccgtgtcgaacttactgataaaatcaaagacgcgttcggtcgtggacatgtaacgcgtgtaccaaatatcactaccgctgaactgcgcggtatcgcaaaaaccctgggggttgaattttgaaaactgtaatggaaaccgtgttcggttctcacctgtacggactgaacacaccgacaagcgacaaagactataaagggatctttctcccgcacccgcgcgatattctcctggggaaagccccgaagactattgacaccagcacaggcgataaaagctctaaaaacaccgtagacgacgttgaccgtcagttgtatagtctgactaagttcattagtcttgcgtgtgatggtgataccgtagcgctcgatatgcttcacgcttcggatgacaagctgatcgctaactctgaaatctggcagtatatccgcgctaaccgctggcgtttttacaccactgaactaactggcttgttcggttatgttcgtaagcaagccgcgaaatatggcgtgaagggttcccgactggctgcactgcgcgaagttgtcgatgtactgaaagaaaccgaaacgatcggtggtattcaggaattcacgccagatatgaaacgctatacgcgtgaagtgaaagtgtctgacatcaaggatcgtttccctacaaacgagttctgccgattcgttaccgacacgacaatgaaatctggttgtcaggacttctatgaagtgctggggcgtaaattccagttcacgatcaaagccgatgaaatgcgtaagtctgtgtataaactctgggatgaatacggagaacgcgcacgacaagcagaagccaacaacgggatcgactggaaagcattaagtcacgcgttgcgcggtggtatgcagttgatccagatttacaaagatggtgatatcgtttatcctctgcctgatagcgcattcctgaaactggttaaagctggcggcgtaccgttcgcaaccgtacaggaaaaactggaagaagtcatgggtgaagtcgaacgccttgcagcgatttcaacatatccgaaagaagttgatcgcgaattctggaacgatttcatcgaacgcgtatacagcgatcatgttgtggggtattacaaatgatgtatcctaaattgtccggcgctgaaattgatgttctgtataaactttacggatacgcaactaaagtgctagacttagatttcgatgacgtacccagcaaatcagggcgtgatgccctgattcaaaaaggttacgctcgaagggtaacgggttatcacgataattcgaaagcatggttgctgattaccccactggggattgacgcataccgacacggtattaaaacggagtggcactaatgactgatgttattttgaacgttaaagatgttgtactgggcgataccaaaaacccagacgcggttacactggaacaggctgttgttcagatcatgcgcgatagcctccgactggaagttactgaacgtaccgaaagcaattacacgggcgggattgatggtcgccagttgtacgaagatagcaaacacgttaatgtaaccctatgggcggacattgatgaaaactcatacaaaattgacgagattgattttgacgtatgaaaataattgacctctgcgctggtgtgggcggggttcgattaggatttgataaggcgttcggcggtgtcgaatgccttttaacgtctgaaatcgacaagttcgcacagcaaacatatatcgaaaactggggcgatgataacctacagggtgatctattcgccattgatgaaaacaaagtaccggatcatgatatcctgctggcggggttcccgtgtcaggcgttcagtaaagccggattgaaactgggattcgatgatgtacgcggtacggtgttcttcgaaatcctccgcattatacacgctaaaaagccccgtgtgctgttttttgagaacgtgcctgaactgctaacccatgacaaggggaagacgttcagaacgatttacgggcttctggaggccgaaggatacaacgtattctatcaacgcctgaacacaaaggatttcggactaccacaaagacgggaacgcgtgtttattgtctgcttcctggatgatgtattcttttcatttcctgttcccccgcgtacacctacacgcgtaggcgacatcctcgaagatgctgatgattcattcaccctctcagataacgcatggaaaggctttagagagcgtaaggaacgaaataaggcaaacggtaagggtttcggttatcaggccgtcacaagcgattctgcgcacactgggacgataacagcgcagtattacaaagacggtgttcaatgtctggtattgcaggacgggaagaaccccagacgattaaccccgcgtgaatgtttccgcttgcagggcttcccagattcgtttattattccatcgagtaagaaacaggcatacaaacaagcgggtaactccgtttctgtccctgtcatcgaggcgatagccaaacaaatcaaaaaggttctgtcatgacaaatgattacagaaaacgcgcgggtattgctgaacaagagaatgcccgattgcgtgaagaactcaaccgccgtccaaaatatgaatggtttgttgaacaagttcgaaaggcattgaaacaagcagacaccgtgcctccacaaaggttgatcccacaaatacgacaactgaaagaagcatccgaacaaaggaaaaagaatatgagaaatcaacccgatatcccgatcgataccgttgttgaatggcattacaaccactgggataatgatgaatggtctgccagccagggcgtattgaagtaccagaaaggcaacttcatcctgatcgaactcgaaggtaagccaaccgtgctggacggtaaagatttggtaatgcgtccgtacaaagaaagaccggaaacaaaattcttcaaaaaagtgtttgcatccggtagttgatagtggtatcgtagctttaccgaaacaaaggagacacaaaatggctaacatgactaaagcgttattccagaagaaagtaaaagcggttaaagaacttgggttcactccggctttgatgactaatggcaaaactctgatcattcgcttcgtgaatgcttacgatgaagttgtgtgggaaaccgtttgtgtcgcctcttgttatgacgttttgaacagacaagagaagaaatatcttgcatggtttaacgaagtgtaatatattggccttgttgaaacgaaactgaaaaggaacataccatgacttttaatgacctgtttaacggatgtactggcgctggtgcgaaattcaatctcctgaaagattacccgctgggttctaatccaggttacgtgatggttgaagtgcgtaacggtgaatactacaacgtgttcatgtgggatcgttctttctcttactgctggttcggtgcgaaatacaaaccagattacatcctggaacaaatcgaaacagtgaaagcgaaaaaccctgaactgtacgctttcgcagagtctatccgtggtgtgttcggacactgattaatcaagccccgaaaggggcttttttcgtgaggaagttattatgatctatactgttgaatgtcttgttgattgtgagcctggtaatctgatttgcgcatcggatactattctggactgtatcgacgcagtgaacaatcacgaaaccttcccgtatgttgccgatgatctcgaattcatcgcatggaaagacggtaagaaagttgcggttgctgtattggtggggaacagagtaggcgatacaataggcgctaacggttatgaaccgaaccctgtgacctacgaagaagttattggtaaaatggtgatcgaatgaaaaataaaaacgccgaacgcggggagaataccaacgaaatgttcttcattcgttgcaatcgtaagcccctcaaacgcgggtatgacgacatcgacgaagccctgagcaagtttaacgaaatcatccgttcatccgtctaccgtagcggggaacatcctggcgacctgtgggaactggtagcaaaagatccttacagtaacatcgtcctgaaatccgaaacaaagggtaaagtatcatgaaaatttatactgttgaaagtttaagcgaagattactatacatttagtgatttggtcggttctaccgtatcgctggaacgtgcgattgaaatggctaaaccttttgactgggtgagtatcactgaatgcgacggctttactggcgaacgtctgcgcatagtaacactgagcaacgaaaaagccattgcgaacgcaaccaaagaaaacttacaatttgaggatgtaaaatgaaaatccgttctggttttgtgagcaatagttcatcaagtagtttcatcgtccggttcccgaaagatccgactaatatcgacaacctgcgcgaaatgatgggcgattgcgtccctgattgtggttactacgatccgccgttgacagcggaagaagtggtcaatcacgttcatcgtgacttaggcggtcatctgggtaatagctttgaatcgttctacgacgataagcgctatgactgggaaaccgaagaaaacgcggaaacccgctaccgttcaaaccctcaaatcgcgcttgcgtatgacgggcgagactggtacgatctggacacagaagagaaagacgctctgatcaaaatgtggttgtatgaagaatacaacacgaagttcggcaatcaggacggcgtgtttatctttgaattcacgtactccgatgaatgcggcccgatcggaactcaactggaacatggaaacatcttccgtaaccttgaacacacatcaaagagtcatcactgatggataataaactgaaaacagaagtttgtgttgttatgcctcgctatgcattaggggagtcgatcccctttagccaggatcgccccgcaccgtttgatgtattttctttgcgaaaatatcttgaacgatttgaactgaacgagtatactctccaaatcgttcgggtatggaatccggtaatgtatgcgcttgcgtttgacgttgctgaatccaaactcactacgatggatgaatacgttgaactcctggcgcgtaagttcgggtgtgatcgtacagtcgaagcagtaagcaataaagttaacgaaattttagaaaaattcaaatacgagaaaatttaaatgtcaatcacaaatatcgaattcaaaaacgctgtatcgaagccaaccccgacaaaccacgttttcgtgtgtgacgtatccggttcaatgtacaacgaactgcctaagatccgtaaacacctgaaagcaaacctggcgagtctggttaaacaggatgacaccgtttcgatcctgtacttctccagcaaaggcgattacggcacggtgttccgtggtgagaaggttagcaatgtctctgacctgtctaacatctgcgcggctatcgaccgttacctgaaacctacgggttgtactggctttgttgagccgttgaatctggctgcggaaatcgctaccgatctgcaatctgaaaacggcaacctgaacagcctgatcttcctgacagacggttatgataactgctggcgtaccgatgatattctgaaagcgtgtgcggttctgccactgactttcaacagtatcgcgttcctggaatacggttattatgtaaaccgtcctctgctggaaaaaatggcagaagcaaccaacgcattgcacaaattcgttgaaggtttcgacgcatacgaaccagcatttaacgaaatcatcaccgcgcagacttccgcgcgtatcgaagtcaaagttgctgatgctacccatgcgatctacctggacgaagggcgcgtgtatgtcctgaacgctgcaaacggtgttgtgctggttccagaacacatcaaaaacatctgggcgctgggtgaaaacgcgattaatgatgttgacggattcgatccgaacatcgccagcgaacagcaagttctgtatgtcgtgctttatcatgcactgcacacaatgaaccctgatctggcatggaaagtgcttcaaaagctgggtgatgtccgtctgatcaaagcgtatgacaactgctttaccaaacaggactactccaacgcgaaagacctgattgcacaggctgttgtagatccatcacagcgtttcgttgatggtattgattacaacatggttccagacgaaaacgcgttcactctggttgatgcgctcgaactgctggcacaaactgacacagtgatcgacctgtcttctgagcactgggcgtataaccgcacaggccgtcagactgtacagaaagaagatgatacactggatcaactgaccgaacagatcgcaaacgctgcaaccccagaagaacgtaaagcactggcggcgcaaatggtagcgcatgaagtctggacaccgaaatttacccaaaccacaaccaaagtatcggttaaacatctggtgggtaacagttcccgtccgaacatttccatcaacacggatctggaagggtatgtgactatcccagaaagcaaacagaaagaattcggtctgccggaaaaagtcgaaactaagcaggtgcgtaacttcaccatcgttaaagatggtatcgtgaacgttaaagttctgccgctggaaaccgatattccgacactgaaaaaccttcgtgcttctggcctgactatcaagccgctggaaaaaatcggtgatgatcgtatgtcggttctggtagactttacctctctgcctctggttaaccgtggcatgactcgcgggttaagcggtaaagagttcgtgactgataacgtgcgtctggaaatcctgaaaggccgtcagaaggttatgaagttcttccgtgacaacgcgatcggactgcgcaacgcagaagggctgaaacagcgctttggtgaggctgcgggtgaatggctgtctgaacagggtattcgtgattacgggttctctccgaaggttgagcgcacagaatcgactgatgtttacatgtcgaaagaactgaacgtgaaaatcaagggtgtttcctcccttcctgctgtagcggctaccgtcgcgaaacgtgacgaaggtaagaagaaactgaacaacggcgacctgattatcctgtgggcttacgatcaggtgaaatctgaactggatgcgcttgacaaagatcaggtagtcgagtatcttgataagcagacaaaggcaacgattcaggaagtccgtaaactgaatgcccgtttaagtcgcgtaatgtacggtgttgtagtagcccatgcatggttcgcggatctggacttcgaagaaaccaaagtttctatcgctgcaaaagatattcttccgaaagaagataatattccatccgatttctggaaagtctgggaaaccacatcattcgaatgtgaaatcgtcctggaagaaaaagaagtcaaaatctaacaatgaccgcccccgaaagggggcatattgaggaaaataatatgtcacgtaacgtattctggggtgaagttgtaaaaggcgatatcctgtatctgtccgaaccacaagcctatcgtgaaaacaacgaaaagaaccacgcatacgcgcctatgctgccggatttcgtggttgttgatgatgtatttgtcggtgaaaatggctggcagatcgatttagtcggattcccatacaaaaagggtgcaatccttctcgaactggaagatcatcatttcttcgcccatgttggcaacatcgaagatcatggtgatttcgatatcgaagatatccgcgaaaaaccgtatgtattcagcaactactacaaggtcggcggacacctgcgtagtgataacaaaactgttctgtatctggatggtattctgtctgggatgcataatttcagcattgagaagccaggcaacagcgcagaactctaccgcttgtttggaaagtacgatcgccagaatggtaaactgttaccgtcagaaatggcttatatcatcaatcgtctgatcatgggacttcacaaaacattcctggttcactatgatggtgatgtagaacaggcgatgactactgtgattgacatcctgaaagcaaaatctcgtgaaatggataccctgccaaaatgacattattcttcatcattgcgttaggtgtgtttattctgggcgctacgattacattcatggcgttcgataaacgcgaatatcaactggctatcatcgggcttatagtagcttgtatcccgctggtgttgtcatacaacctgtatcatgagaaaatcgcagataacgcgaaatacgaggcaaggcgatgaagatccgttctgggttcgtgagcaatagctcaagcagtagtttcattatcgggataggacttgtccgccctggtaaagaacaggaagttgcaaagatttacggtgagtcaaacattgaatcgctgatggatatgatcaccgaaattcatcatcgtccgcgctggggtgttcctcaagtacatgatgacggtacaatcacactggaagcgttcggatgtaatagcgtcgaaataacccgcatctgggacaagctgaaagaactgaatctggatgatgttaaaatcgttcacttcaatgagtgcggcgacgaaccggaatacgacgaggaaaccggaagttataactatgactggtatgacgacgcggacgcattcgggccggaactcgaaaagaaatacaatctcctgagagataaccgcgaactgttcattgaaggtgatgttcgttgcggtggtggttatgacggctaaacgattggtgatctgttatcgctgtttgcatgtgtatgatcacaacacagcgaagcgaacagcaacaaagcgcttgcgcgttaaagaggcggaatgtcctctctgtaaatgtaaaatctgtttggggtaatccatgataacgatagtatactgggaagaactggaaagcgaattcagtgatgaagctggggaaatggctgctgtagcgggtgaatctgaaatgcttacagctaccgaaagcatggatgatgcatttgatcgcatcaagaaacaccagaaagaaaacgaaggtcgggatattcagtacatgctatcgttctggctggatggtgaaatcttctgtcatgctgctattgctgaggatactccggtcgatatgtgtcgtgaagaaatcgtgaagtacgtcaaatcttttatgcattaattaaatgagaattgaaaaatggcttatgtatctaaaaaaattgaaataatttcgtcgatgatgggtaaaactctggaagagatcgaccggattgggaagaactttaaagatgaagttttccgtttgcctgaacgtgaaataaatttaatcccgtatttcaacacggttaaaattctgatcgatcctagttttggtctaacggcaactcattacattgtcggtaatgctccatatatgttcgtgttcagaaaatctaagttgattgcgtatttcgatcgcgcgaatcttggacatgttcgggcaatcatcgaccggatcgaccgttatgaagtagggaattacacggaacaaaccagacgcactacatacggaaagattacgagtatgctggaacaaaccaaacaattcgacggagccaacatcgaattgattgatgatctgctaaaaaggatcaacaagttcaaagaagcgtttgacgtaaagaaaaccgcgcttgctgaaccagaaacggtgaaagcgccaaccctggcatctttcgaagaaccagaaaccattccagtaaacacagcgttgaaatacatcatcgaaatcgaaccaaccgatcttgatgcaacatgtaaagcattgaattctatagggattaatttcactctctataataaattcagttaatccaaaaaagcccttgcgttcgcgtgagggctttgttatattacacatatcgaaacggaacagccaaaaggaacgagaacatgaaagctaaaatggtgaagttcgtaaaagactggagaaaaggcgcagtaatcggtgagagctacgtaatcgtagacatcgaaagcaacctgctcgaaggtgcgaacgttttagaagttcctcgttacggtatggttgaagccgctgataaagcaaaagaactgaacggttacgttctccacatcatcgaagcaatcgagaaggaattagcatgaacagcgtttatctgattgaagaaaccattatccagccaaacggcggagtgtatgaaaagaatatcgtgtgtgctgccctggatgaacaagaggcagatcacaaagtgaaatatttaaatgaaaatgctgttgtatgtcagacgtattccggttatagtgttgcatatgcttggaaagcggttagtttagaaacccaaccatcttggttaatcaacctgaaaaaataaggggcttatcatgaaaatgaattacgttcgcggcggtatcatggcactgttactgaaaggtgtttctcgtagtgagaatcgtatgggtatggggccgatgggtaaagtctggtctgtctatattggcggtgactgtatcggttacatcggcaatgatggattgagccgcgtttacctggctatctcaagcgggggtcgtgaagtcgaatgtggtaatttcatgcaagcacttgcgcagttcattgatactgcgatcactcagattgaaaaacagggctgcatcgaacgccgttacgcgaacaagatcggaatgattgaatattccaacttctgcttcgaagtcgaagaagtgcgttacgacactatggacgaagtatatgaatatgtgcttcgtggtgaggaagtgattaagtcctacaacgggacgaaggttatcaataaccgctctttcatcaccccgttcgaattgcgatatcaacagctaatgggctggatcgtgatggaataagaaaagcccctttcggggctttttgttatgaggatgatagctggagtttgattctttctacttcttccggttcatcaatgatgctgtagtaaatcgtcacggtgattgcgttttcgtcatactgcggaatcacttcaacatccagattgtaaacacggggttcgtatgcgcggatcgcggagacaatcgaagtccttactgcttccgctgttagcgggttcatgttctcgaaaatctgttccccgatctcacaaccaaagttgctatcgaaaggccgtgtgcctttttgtgttgttacgataccgatcagactattctttaccgctgccgcccctttcgaggcggttacgtcattgttccagtcttttgttaagttgggatcgatatcgctatacagtaagcgaaggttaacacccattttatccaaccacctttagaaacgcctctaagcctctcagtgcaacgatatgctcgtagccacacgaacaccttaccggaatgtttgcaacgattgctggcttatccagagcgctatttattgatttaaagaccggatagtcgatactatccagaacggcttctttctctgactctttacagtcatcccataagatttgttcaccgtcgatgactacaaacttaatcagttcgggtaactcttcctttccggtgcggtgtggttcgactgaaatcttgatctcattgccgtacagcttttcttcgtattcatccaccatgatatgatgacgattgagcacaaacttaatcagttccccgcattcagggcatttgatttggagatctacagtctctttgttgatactgtcgaacagagccataatgtaaacataatcgcgctgatgcttgaacacatcaccttcaataatgaagttatccgtgtcatcaagatcgccaatggttaacgggcgataagtcacattatattttgggatatgtcggggtgtatgtttacgcatttgcattctcttttcgtttcaagtcttccgccagcaatgcaacgtaaattgaacgttccatcgggcttccattcattataggttcaatctgtacggtattcttatttaacaaatagttggttttgaagaactcattcagttctgatttgttgaacaggattttgtacagtgtcaataagtcgctgaactcaatatcacgcacggtaacatgacaggacttgcgtaacagtttaacgatattttccatatcttcaatagacaccagatccaggatcgcgttctttgtatcctcgtctaatgcattccattcgtatctttcgccgtcctgcttgacatactggatacattcaaggaataattgttcactgttgttacgatgtttcgggaatttgaatcccagagtaagcgaatcatcaagggcatattcattttgcaaaacgtaatcagttacatgcatgaatgcttctgattgtccgctgcttcctttgattcggatcttgattgcgttcttaccgaacgatacacaatacaccttagtgaaaatgttttcctgttcggtgcgggaataacccggatacagaatatctaaaatttcatccagcatttcttgctgttctgtgagcgtcttcccttccatgtccgcgcttgtgagtaagaaactcaactgatcgcgcacggtaaacatagggaatcgcttcactccaccagggagttttacgcggattatatcaatcattttaacctcaaaaggggctttcgccccttattgtcctgtaaccacaccacgaacggcaattgctgcaccttcgataagtgattgtttgaatccgtcccaaccttctttatctgcttcaacaagccagcctgttttataagcaaagtcaacagtgaatgtccagatttcgttattgctttcataactcagttctgggttgctgactttaacaggcaaacacttctggaatacatacgtgctgtgcgggacaccatcgcgattgtgtaagtttacctggatcgcgcttgatacttcatcaatgaatgcgaactggcctgagacatcatcacgaatagctgataaccattcgttgaatactttcaggttacgcgcttctgaatccacacggaacgttagcgataattcaccattctccggtcgggtgaatcggatctggggtacaccgccattatacacgtattcataacccagtgttttaccaggcaactgaacaccaacgatgctcaaccccatattatacatcattttgtcacggaattctgttagcatctgtccgtaaacactatcaccaaacagggaagtaattaaacgagggcttaacgcccccatgattttactgaaacctgttttgttcagggacataatagctttatcaaccgtatagctgaatagcttgcttacgccccctgtaatagcgttcatgaactcgttcgggttattcgcgttaatggaactcatagtaccatctattaaagtatcgcggatactcccgatcgtgctgtcgagaatgcgtgatgctggactggttgcgaatacaacactaaacaagttgcttcgctgaaagtctctatttgccattcctgacaaaaattcatctacgctatagaacattgttcccccttaatactgcgtatcaaaaatcgaatcctgacgcatatcgatcagttccataaactgaatttcgatttcaactgcgatcggggtgttcggtgattctctcaacgtatttacaatgttgtccattgtacgcccgaaacgaacgctggtaatacctgctggcccgaacgtggaatgagggaaccgcaaactgtcgcctgtctggaagtcacgaataaaccacacaggaggcgatttaataacttcaacgttcgatacgaagtcaacaatctgatccccgatgctgccgttgaaatcgcttgctgtcgtctggtttgttgatggtgcaaaaacgtttgcaaccttcgaagcgctggaattatacgcttgtttaaccagtccggctaattctgctggagtaccgcccgaagtagtaccataacccagcaccgtgaacaggtaatagattttaatcagttccagcaggtcataacggctttcgataacgaatgtattgtaatacatctttgtgcgcttatcagagccttgaaacgctgctttagtaccgatgtcgattgcttccctacggtctgccagaataccaccagaaacggattctacagcgccccagataacgtttgataccgcacgggataaacctttagcaacaatactatcggttgcatcctgataacggtgtgagttcacttcgttatcgttcaggcttcgcggtaaaagtatttgacaaatggggttaagtgtacccatagtacgggtattcaaaacctgtttgtatcgaacgttcccagtgttagcactaaggatctgttgcgcgttctgtgctgcctgacgtaatgagcggtagttgtctttactgcctggtgcaagtccacccgtgaaatcatatgctgtgaacagcaagccgttattatacaggcttgatgcattataagcgttatcaatacctgctgcacgttgggaaggaaattccgctgttacgatcggttgagtcaacgcgtttttagttgttgcagcacccccagaggggatgccagcatttttgatttcagcaaatgattgtacagtgtcttgcaatactgtaattttcatttaaatttcctttaagctaatgcaatcaatggtttacggtcagttcgttgtactgaatgctgaaccgtgttgtttactgttttgttgttgacctgaacgctgttaggcgttgtaggctgaacaggggctttcactgcttccggttgcttgtcaatacttgcactcgtttccggtactgtggtgatcttttcctgccagcgggagatcatatcacgatagcggtctttgtcgtcctcattcagcttgttcgaattgtttttctcttcaagcgattctatgagtttttccattacctttttatcgttgcccgtcagattgtctttgttcaggatttcatcaccctgatcgaattcattatccgctttaggtttcgctttcgcttgcgcggcttcgatctgtttggtttcgtccacgcgcttacggttagcggtattctctttatcaacctcagcctgtaacagtgcggggttttcctgcaatgctttcagttctttcttcttctcttcggtgatcttttcttcaatagccacacgatcgcgcatctgttccaattgcttagacaatgctttctgtgcgtctgtttgctgtccgaaactatatgagaatgcgccctgggtagccttaacctgttcgacaaccttagaacgtgcctcaaccactttatcattctgatcctggatctcctgctgtttcagcagaatcagatcatcgggatcaatttcaagaccgtatttttgtttgtcgcgcagtgctgatactttcattccgcgtccggcgttggtaatcgtttcagatccggtatattcacccagagcgtaaatcagattaccgataccttccgtgattgcggttttgatggtatcgcccagaaccttaaacggttcaaggaacaagtttttcagcgattcgcccaaattactcatatcgaagttttgcagaccttcgttgattttctcagcaagggttttgatattcccgaagtatgaaccaaacaaatctttcgaggcttcaccctctgcaagaatatcctggaaccacttctgaacaaccttactcagtacgtcgatcgcaaatacgatactaccgataatcagagtccattttgcaaacttcgccagcgcttcgagagaataaccgataaagcgagccagaagaccggatgtattatccttgattgcacccagcaaagacaatactttcttgctgaatttcttctcgtctttatccttatcgcggatcttcttcttgtcccgatcgacctccggttcctcttccggtactggttcaggttccggcgcgggggctggtttcttttcagcgagttcgataaacttggtgattgcttctgcaatcgttccggtgtatgtttcgattttcgcaaatgggttatgctggttcgatacactgacggagttatcaacactggttgtgctgttgtctgttaatgatggtggacgcgctggcccaacaaaatcgggcaactgttcagcaagtggttgctgatcctgttcgtattgttcctggaagccagcgaatttctctttgaaacgatcctcaaaggatttcacactgtctttgatgtccagtgtattcagcgcggtttcaagggtgttatcattgatatcctttaactcacgcattgaatctttatctaacgttgcctggatcttacgaacagtcggttgcgcctgtggttttggtggattctgcatccggcgacgttgttcttcgttaaaatatggattgctagccattatcattcaccgatgatgttaagccctttaatggttttcccctcatgcacaatatagacttcctggagtacgccacgttttacatcgtcatattcataacgatacaggcagttaattaattgaatacggttttcgtccgtcagttcgatcggcttcccgttgtcatacgcttctttaagcagtaatgccagatcatccagcattagggtcggtttgttgaagaccaatcgaaggttatcaaaagtatgttcatacttagcttcgctgattttcatatcatccagattaataccgatctctttcagtatcgccattgccttatcgtcattatgataatgcaggtgaatcaaaaggaattcggtttctgctgcggttaattcgcgcggttgaatctctttgatgatatactcaagcaactgcattgggtctttcattgctttaatctgggtgaaatgacgataacccagacgggggatcgtaacctgttcaccagtaggcaacgtgactactttatttttgctgttcttgatgtttaaacgcgtaaccataaatttatcaagtgtgtttttcttctctttcatgatcgcctcaagtatcccgatatttactatttagtaaatagaatataaagggaggatgtctaatgtccagtaaagttataaaccgcgtcgtgtcggttaaattatatccaacatatgaaaagttcgctgataacgtctatcttgaattgttacctgcccttgtctcaatgagtgagaaaaccatcattaacggtacttctgaaacattgatgcagatctatgataaccagttaatctatcagttgacagaaaaaccgattattcaggtatccttccagtataacgaaacgttagaacagcattactacggtgttctgtattcaaacgtcgaaaccgatgatatgaaccgctctatactgcgcctaaacctttctccggtgcatacggtgtttcgtcgtaagttttcccgttcgttcagtaacaacgccgtacagacgattacagagtgcatgacggcactgtataacgatatgaagttgatcacgccgcatatcgacgcatcaaacgtgcgtattcctccggcttgcctgagcgggacgtatgaaaccgtgtttgattacatccgtgacaacgggcagagcgtagattcgtctgacttctgttatctgtgggaagatggttccggtatctttatgaaaagcaatacggagatcctcgcacaaaccccgttaaaggcttacaagttcaacgtaagtaacccgtttttaggtgacgctttggtattcacgaaaggtgaatacattacccataaggataacactaccctgttaggggatgcaagtttctttagtttctcgatgacggataaaaaactgtatagtgatatccttgcgagtaccgatattgaaaacgcatggatcaccatgaacagaaacgcggtatatgagaacaacttccagaacccagacaaacagggtcaaccgttccaggctgtgaagtgtcagacgttatccagctatgaaaaacgtattcggtttgatatcaatcagggtcgaatggatgttaaagtgggggcattgattgaggtgttaggggatgaatattcagggaagtatctgatcgttgaatgtatccgcgatgtatcaaaagatttccacctgcaaacattggaatgtgtacaggtggcagcggctacgaatgacaccagcaaaaccagtgaggcttaggccgtagtttcttcatgatagcccatgaacaggtcgaacacgttgttcttgttctgtttacgggctttcttgatattctcgtagttctcgcgaggcatatcgatcatgaagcacttctgacgcgctgtagcgttctctgtgagcgcgaacagttcatcttcggtgtaatccttgtttttgtccagatcgagaatgacgcattgccaggtgtcttcatcactggtttgctgcatcatcaccagcgcggcgtttttgaaccccagattatgagcaagcatttcatgaacgaattcgcgatcgtcgtcttcataacggatttcttgcccttcccaacggatcaggcggatagttttacttggttctgatttcataatttattcctgctcatgatttcacgcaaacgcttcgtcggttctggtggattcttaatgatttcctgaatctgattccagacttcttccgaaacttctttcctttccatgataacaatattcgggttatcacagcattttccaaccataacacaacgcccacaattaaggcagattgtgtccggtatcgttggagcattatcaaggaagcgaccgaaatcaatatctttcagcgcttccgcaacccgtgcttcaacggcttctttactcatatcaaccatttttcgcctcgttcatccaatcgcggaatttccacaatttgttctgtgctgcgatgtagctttcttcacggaaattagaagcgcaatagattagagtcgggaactgaacttcgttattgcttggcttctcgtcaaacacatacacctgaatgttgttgcgagttaaacgcggtgcgttcatgccagcaatcagagccagaaaatccgctttcttagttaagtgagccattgacataatcttttcctctttccgtgttgtttcgatgtgggtaatgtatcactacactacccaggaagcaagcattattttcatttttcttctttgaagcaaagttctacttcaacgttgactaaacagattgcgatatcccatgaatctgcaactgggtcatatactgctttgtcttcgtctgcaacaggcagagcaacaacccaaccatcaacaacacgtttaacccgaagtctttcgaataatgctaccgcttcgcccaaagactcaccaccattcgccagcttttcaaaacgcgcacggtctgccaggttgattactttgccttcgagttctttagtgatttgcatgggatgttccttttgtctgtttcgtttcgatgtgtgtaatatacaaaaagcccctcacatatgcaaggggcttctttagcaaaaagtgctatttaaaacagatcagcgaagataacgtgaatgtcatccggttcggtcttatcgcgtcgaatcttcttgatgattggcaggaagaaactgaactcaggttcgcccttcttacgcgttttcgatttctggagtccgtcaacttccatttcgacgatagcgccgatatagtcatctttgttcgccataatgtattcgcgatccagttcaccacgttcttctaacgggatgtacacgcggttaataccgtcttcatcgtatcggtagtccgtatcagtcagaccggaacctgtgttcgttctggcttctcctgataagtcctcaaccacaaacccgccaaccttatgaggttctttggtgtgttcgtacacgtcgatgattcgcagttcgatcggggttttgttcttcaacttcacctgatccgcaacgcgtgaatccttccatttgaaatcaacgtttttcaggattgaaccctctttaccgtcattgcggtaattgttgtaatcctttttcgcttccgcatagttctgcaccaggatagaagggatcagcttaaccgatgttacaccagagccagccagcgcaccttccagtatagagaaacgatcgcaatatggttgaacactcggagcatcgccatagtatacttcatacggtacgatatcccagacaacataaacgatattgcgctgttcttcgtcgctgatagtgcctttcagggatttgtttacaatcccgttgccctcttcgcgtttcgcttccgcttgtgtctcgttctcggtagcttcccgcctaacatctgccacaaggtcagaaacagaatcgtcgtcatcgcccataaacccagcaagactaaatggaacgctgttcgaaggaacgacagcagttttttcagcagggacataaatcagttctccatcaagtacaacatcataacccagataatcacgaatctttttcagatccttgtccagattcaccaaaccttcatactcatttcccgcgcgggttgctttgcggatctgattctctaacagatcggacatacaacgcgcaccatcggctttaagctgcgagaaagcagggaagcgaatacgttttaaggctttctcgctaaacggcgtagcgaggcattgaggctgttctggaatgagtttcttccatacgcggttcggtaacgttgtacccgcaccacattccagatcgcggttaatgatacggcgaagaacttcgcgatcattctcgttcaccgatgatacgatatccagcagacgatcacgggctgcattgcccgtatattttcgcgttgccaaatcagacatcaaatccgcgatagcattcgatagcggggttgtgcctggcttaccgtccacctgcggaaacttcttaatgtgaaacataatctgtttcgtgtacgtaatgcggaaaatctcttttagcagatcattacctgcattacgtttcaggatcgcttccttctctgagattttcagagtcgaagcgagttcatttagaatctgtaagatcatgtaatttctcttcgatttcaaaccatgatttaactgactggtgaggcgaccacggggtttcacgttcaccacgcaacatatggaataacggcaactgactgatgacgttatgacattcgtttaagtttaccgcaagatcatcaacgaagcaaaccagacgattaccatatttggctttcgcttccaggtagcggtgtactttggtttcaccatgcccgacaaccatcacttctttgaatgcggaagggaacagcgtgttcaggtttgcaatacggttaaggcttgctgtaggagtggttcccagcgccgtgacagccacgaaatcatatttggctttcagacggttgatcacaatcaacgcatcgtcatacgcgcttagatagcgaataaacgaactgttattgtattcttccatgaggattttagccagttggtgatcacacccaaagatttcggtcatatcacggaacttttcatccgtaaccatatccagcgcgatatcggtcggcatgttgtgtttagacaaaaagaacgggaggccgctttgccattttacggcgatcccgtcaatgtcggtaagaataactggtttcaagatttaacctcataacgatcaaagaaaagggtactcttaaacgcttcaatatccgcaaggaatttgtcacgctcgaatgtacgataataatcaaattcgatacacagcatatcatcgttcgtaacactgataccagtgatatcttgatgatatttctttgcctgttgtagaacgaaaggatcgagatccgaacagtcgaaataaattacgtaactcattatcaacccttgtacatataaacagcgtcgaagcctggaacatccatttcgactttatcgaacacaatatctttcagcttgcatttttcaacgtagctgttgatcacgttaatgttgttcgcgccgatggtaacgtaatacacacccgctttgtagataacacccataatcagggtagaactcaaagcaccctgtgcgtggagtaatgccagcgggttaatcgcgcctttgaacaggaacgcgcattctactctttcatcataatctttcatagtaactctcagtcaaaaaatagtgcgaatattaaccatataccgaagaaaggccagaataacacgatcagcgggaaaatggtatgttttaaaagcaaagtttttggtgtgtgatatccgttatgacttacaccaaagcaccaggaaaaacgtgcggcgcagtatacaccaacaacgaggtatagaatgataccgatgacaatcaaggctatcatagtagatcccgtaatcgggttaaatttcggacaaactcacgttcagtgagtaccgtttcattcatcttattctttcccattgaatgagtcaaggtactttttccggttgcagccagcgcacggcggaacccgtcattcaggaaaagagcattgtacgcgttttcaatcaggatttgatatgcttctgattcacggtgaattggcatacccttccagtatagggtctgatcgcgataccatttctttttcttgcctttgaacttggcggctttaccaaccagcgtacacacatgcgcttgcatatctggattgctgaatttcagactttgtaaaaagccctccattgatgcacattctaccccgtcaaacgtgaacggatgcggggcgaagttgctcaatgcgcatgatggatactgactacctgatccgatgtccatcatcaccccacgaagttaacgagtaatgcagaaaccatacaacccagagcaaaaccaaaagcaatcaaagccagttcactattctgtttcattttcggcttccttcttcccttcctggcgagcgcgtttgcgtccagcacgtaccagagaatcatagtatggacgtttacgatcgatgttgtcagtgcggtatgctttaccgaaatgactcgttttgaatccgtaatacttcacgctttaacctcgtaaggcttatggagtccacgcgccggatcataacggtcatatgttgtcccgttggttgatgccatgatagagacatcctggcgacggttccagttcaacagagcaagaacgatacgatctgccgcttcaataaaatactttttcattagaaacctaccttccatactttttcgaatttgtcgaatattgcaccgatacttttcagatacgcggttgcgtcgtcttcggaatttgtgtacatcgcgaaggagtatcccccaaattcacgacacactgatagcggtttgatgctggtaatgttttggttatatacccgcatcttatcgatcattgcttcggtaatttgatgctcatgatattcgagaatatatttcatttgattgtatacccgtatttgttggtttctgcattcaatgcaatagccagcttattcagatccccaatatcaccctcaaggtctaaatcaatgctgtcaatcttcgcatcattataaagatcagtacccgcgtatgcatcaatttctacgattttcacgttgtgttctcgaatgagattcattgatgcttctgggatacgacgcatttcgaactgaaacgttcttacttcgataccttcacgcatcacgctctctccagacgggttgttacttcacggttatagatccgcgcatactggcgaatgtcttcgttatcgctggtgttcttcgcgatatatgcatcatcttcggtttcgaatgatgcggggttgcgatcgtcgtttgacagatacagtttaccgaagatatctttctttacagtctgtaccccaacaaacatcacaaaatctttttctgtgttaatggaactcatgattatttcccgaaaaggtggcggtcttgggggtttgcatcccattctttttcccagctactacgctcgcgatctttatagacaacctgaaccgatgcatttttaagttcttcgatctctttgtcgcggcgacgtaacgcggtgatcagttcgacaatgaggtgttttgcatagcgatcttcgctgttactcatgaaccccattactttctgttctaattctttggtactcatgttaagccctcaaaccaaagctacgttttttgatgacggtgacattatgaacacctctgttattgcaagtgctggttttcagagtttctgctttacgcgcacccagaaccagagttttaacaggagtcacaggagcagcgataaccacaacagcagcccaacgtgcgccaacagctttatcagtacccaggtcgattacagcagaggtatttttaccagcagccagaacatacgcacgggcttcacgacgagtgttgaagcaaaccagttctttcatgttgtaagttttcataatgtcatcctcagtttcgtttcgatggggctatattctcacagcccccagattaggtcaacaactttttagaatttcgcctgaacgtcagagatatcgtcggcgtattctacttcaccgtttttgtgctcgatccggtaagagtagcccattcttttcatttccgcgtctgggtcagagaaagcgatttccttaacttctgcaaccacaacaccattatcaactactacgaaatgttttgctgcgtcgattgggtttaatttaatcattttctcgttccttttctctgtttcgtttcgatgtgtgtactttaccacactcacgattcagtgcaagcattattttgcataaaaacgaaaaaagccgctacctttcggcaacggcttgatttttaatacttttcttctggctggaacaccgcacgacacgcccacatagaggcttctttcagtcggtctttcgccttttggatttgatggatacgttcaagcatcgcatcgagttcttcggtagtgaatgaatcggtatctgataccgcgtaatcacttgaatactcttcatccagttctttgaagatttcacccagggcaacttctgcggccttgatgcggtttactttgtcgatcttttctttcgagtggggcttatagccctgtacgtcttcaatcgccattatatactctctgtaaaggttcgggcgataacgtcgcgctgttgttcaggagtcagtgaattgaaacgcactgcatagccggacacacggatcgttaactgcgggtatttttctggatgcttcacagcatcttccagagtttcacggcgcaacacgtttacgtttaagtgttgtccaccttccactttaacagtgggttgaaattcaatatcgacttcacgttttgcgaatggagcaacgcgagctttaccgatcactgaatccatttcgagggttttggataccaccacacgaacatcattaccttcttccaggtagattgtgccagtgtgtaaaccttctaaaatctgatatgctttcattgtattacctttctacgacataataacgcaacgggttgatatggaacgccagcattgcacgatccagcccgttagggtcagttacttcctgtttcagtttccacccgcaatacacgcgtaagcagaactgaacctttccgactttaagccacggtttgaagacataaagcccccatgccgaatcattccacatcaacagataaccgtgacgcgaaggatcggaaccaccttctgttttcgggttgcccttccaggcgaagtctgactgtgcttcacgccctaagacgtgataagcgaagttgtacgccttgttacgccacaaccagcctacacgttgcgcatacacacccagatcgcctaagtgataccggatgttagcccaacgccggatatgtccaccatcaccatcgatcgggttgtcgaatgtttccatccaacggaaccctttaggtaagtgtccggtttcttcactatagaacggaaccacgaaaggagccagcagaatagccagaacaccagaaagaatatcaaggggaaccagtacaagccagcttgcgtattttaaaaagcgcatgtgcttctccagaaaaaaggctatccgaagatagcctgttgattaacgaactgctttgatatacttatacgcttctgcgaattcttcgtacagagcttcgttacagaacggaataccttctgctttaaatccaccagtaataagatactggatgaagaataccgaagcatccatagaaaccaactgatgattagtaggttcaatatcagttcgacgaacgatattcacgatagaccagtcgaataaacggtgactgtgttcacgcttgctattcacctgcggcgatgcaaagaaaccatcaacagaatacgcatcgaacgctttacggaattcgttatcgaaatctgggatttcctcggtaaacagtttcatcactttaccgttgatttcctgttcatttgatgaagcgatgatttcgcgaattttcggggttaattcaaacagcttttgaagacctttcatatttttctcttttaaatttcgtatgctgcatctatgcaagattgtattagtgcgtcgggcgaattctcgataattggtgcaatttcaccacatacatctgctgcataaggatcgtcatcaacataacattcacggaattttaatttatatcggtagtcatttttacataaccccgctttccattcgttgaatgtcatgccgtaccgctctttgaattgcgctggcgtaatctctttgaacgtatggattgttttgcctaacttagagtcatacaccgtcttttcacgaattctcatatagatctcacattgtttagtgggctggaagtttctttacttcaccccgcattccggggaacctattaccggataccaacagagcctatcccgtgggatatggttgcatattccgaaccatttaacggcattgcgctacgcacccgaattggagcaggtgaagggactcgaaccctcaacaatctggatggaaaccagatattctaccaattgaactacacctgcaaattttttagaactgtttgcgatagatttcgcgaaccagcggatcaacatctttcgcgtacttacatacgtcttcgaactggacgatgtacgccatgacttcatcggcacgggatttaagtttaccctgatgcgcatcaatgatcattgctgtcattacgtcaatacgcgctggggcttccagaatttcgcctttgtcgaacagctttttggatttgctgacggtatcagcgataattgcttgaattgatttagccatttttagatctcgtagattgcctggattgctttgtaatgtgcggaaacgtattttgtttccttctcttttgcttctttttcggaaatgtaacccgcaaccagatcagggtcaggaacattcgccatgtgagcgcttggcagtgggatatatttacccaggattcgttctgccgcttctgctggaacgtctacgcctacagaaacaactttaccataaaaaggttgttccccgtgctggcgtacaccaaccacgataccagattcagatttgatttcggaaccctgcggacgcgcagtagcttcgatgatcacatattcgccggatgcttttactttcagttcagacatttctttactcattgttgttaaacactactttggaaaagtcgataaacgattctaactcttcccgtttaatttgttccacgacgcagccatatttctgcaagcgtgaaatccattcatcattaccacgatcgtatttatcgagataatacaccgatgtaatcgccccgctagcaacataccattcgatatgtttcgcgcagttagggcaaggcgatgcagttgtgtaaagtgctgcgtctttgagtataacacctcttgtgtgcgcactcaatagcgctttcatttctgcatgaatttcgttatcgtttgaccatgctgaatgttcaggacgatcaaccgatttcagtttaccgtcatcattcaccatatgattgttgcatgagttgcaacgacaatcaaggtcaaccgtattattttcgccccacgcgacggcacgaccaccaatcgcgataatagcacctacacgattcgaaatacattgagaacgttgactccgatcgattgctctcagcatattcattactttgaatttcattaacggtcatccatatatttcagaatgtctttgatgaaatcgttatcagggttgacgatgtgatacgtagtacctgaacgtgtcaccacttcaacaaacgatttgttcgccggaatcgcgtattcaacaaccggacttgttgcaatgtcctgttgaggatcgttatcaaccaacccaaacacacaaccataacgaagcatcgttggttcagtacagaaccatgcctgatgaatctttctgattttgtcgctcataatacccccgcccatgttacgaatttagttaccggattccactgaatcccgaactgctgttcaacgatgttacgttgactcaaaatacccagaaggaaggagaactgaccatcgcggacaatcttcactgtataaccagcaggaattttatcagcaatgcgctggcctaactggttgagtttcagttgaagttcaacaggattctcaactttaacacgatcacccagttcaaccatcacattttcattttcacgaataaccataatattctcctttgtttgtgcgggtatcttatcacacccgcactcactgtcaactgttttttagaagtcgccgtaatcaacctggaaacacgggataccgttcattcgccacatcccgactggtgtatccctgtcgtccactgcaagaacaggataatacttatcgagaatcttttcaacaagaatttgctcttttacgtggaaatcgtgacgatgatcaccttcttcgcgcatgtagataccatcgctcaggtcaacatcatatccgatcaggcttgcagcggtatcatgtgcgcactgtacagtaccctcacgcccagacacaacaacacaggcatagccagcggccttatacatcctgaacagttcttgaacaggagggttaggcggatcgttgataactttcgtgaagtcatacgggctacgttgtccgactttggttaatgtcccgtcaacgtcgaagataacgcatttcggtttgctcggatctgcatagctcatagctggaacccagccacggagtttacggtactgttcgaacatcgcccagacacgggaaacaggtagagcattcacaccgcgtttgtggtttcgtttcaggagttctacaatatccgcatccatccattcaatatggaaatccgcgttgaactctttcgcgatctctcgccacacatcatgatctttttggtgtaaatgggtattgtgaacgataacgttcttcccactcgccagggcattacgaactgtatcttcttgcacacggcaaacaaacagttctttctcttcggtgaagcgataaccagtgagatcaccgccagcacagtaaagggttttgcggatatcgtcacgggaaacagtcagagtgttccccagttgacgcgctttttctttcgcccatgtagttttcccgctacctggtacgcctacagtaataaacagattcatttcacaatctcatattcaatcagttctttgttatgctcattcgttagattgagccacatatcacggttccagtcattttcgatccagagaccttctttgtccttcttcgcatcataaacctttccttcggttatgtcacggaaaaatgacttgattattttgacttgcatttctcagggtatcccacggtacacagaatgttatccgtctggtctttctgacgcttaacgtcattcatccagctacggaagattaacgaatcgggatatgaaagggcaacgtatgggtttccgtcataaggcatgacaaggtattttttaccgtcaatctctcggacttctgcaaccactttccatttcacattcaccggattcaccttagcggggagtgtaggcaaaatcttttctgggggcttttccgcacacccaaccaacagaacgcccagaacaagggctaacgttgcaattttcatttgtcgtactccgccatatactcttcgaaggacttattgatcttgatttcgatcagtcctggttttttaaacagcagatctttacgtccggcatccttgaccaactgctgatccttacctttttgttcgacatagatcaccgtattggtgttgtttgtctctttgacttttttgatatcagcctgtaactctttgatatctttagccaattggtcattttcacttttcagcgtgattgtcatgtacaaaagccctgccaaagacagggctacaatgacaggccacaccaaagaagttaactttggaaaggctggtaatgtcatttatattcttccggtataaactgttcgtagttcttcgccattaatgcaacgatgttatcgaccagcttttgcttatcagtatcatcgaaataacgcatcataggcccgaagataatacgaccgtcaggggttaagtcagcgctcagggcgatcgcgtagtctttgcgtgatttgcctttcgtgtcttcgattgcctggaatgcttttgcagtcagacgattgagactatcaaggaataacgtttcgaatgcgtcaattttcttgagtgcgtacatatcatcgaggaacatttgtttcaggtcatcgacggtattttcaacaatatttaagaacagatctttgttattgttgatgctatccttcgtgcgatgaaggtttacgtaccagttggttttcgctttcacaaaacctttatcagttttgatcacgtaaccctcgaaaccttctttcgtgtaggcttcggtaatgaacgcatccagatcggtgacttcgattttctcgcgctcaaccaggaacggacgtaatacaccatctgcgaagatgtcctgataatcgacgtattcgcccgtgtcgttattacggatgttcaggatcaccactgctggttcctgatagccaattacgatacggtttgttggtgcgacgtattccatgttgactgtgaaaccatcgttaaccagttcggtcaggcgatcgaacaatgctcggttagtctggatcacgctcatagcgtccatagcctgttcagattgaacggatgctttagacttaacgcccagatagccggaatcacagaaggtggagatcagggaaccatcttccttaatcatcacatccactacggtttcaccaatcgtcacaggagaggctttcagtgcttcccatgcctttacctcggcatagttgaaaaacttctccatagggcgactgacgagttttacgggggtatccccatccatcgcaaacatgataccgcgacattccagcgcaccaggttttaaccagtcggaatagctcgccatgcgatagttaaagatgcgcacgttggtttgcatcacagttttttgatcaatgaagtagaagcattcgctttcgttacacagtttcatcaactggtcaaagagggttttctgatttttggttagctttgtcatagtgctgtttgttccattcaggattgatttttcggatcatgtttatttcaaaatcatgatatgtgtcttcatcgtgtgttgtcacgataagatttacacgcttacgttttttgattgccatttccagacgtgcggttttcaaaatattactggggtttgcttccctccagtatttcgaattgcggtatgtgtctaaccgcttccacaaatcacgacattttccaacatacactatccgaccgtcgatttcaataaaatacacacaatgccggaattctccacatttaacaaaactccggtctatccttttgtctgaacccagacgcaaaggaaatattacaccaaatgttacatcgtccattatatatccaacttattcacctttccggtcaacacattgacgcagtgagcaatataatcaccgtggcacggtagaggtttgcgtgtacatcctaacctcttcccgtccaatgctttcagttcgtcgattgtgatcacgccagttcgaatcaagttttggaaatacgggatgaagttcattatgttttcagcccgtgttcccttgtagaagggattgccgaatttcgtacctctctgaatatcgacatcccagctacctttatacttgtttacgacgcgacaatcaagcgtatttttgtcgccattttgcataggcttcgtcgctgatctcggtgttgaggttgccaaccaggtaagaactcacttctacttcctgtggggctacctgtacgttgtcagacttcaaccatttgttcatccacggatacgggttcggcgttggtttaaatggagactgcaagccaaccgcgcgcatacgctgatctgtcaggtgttcgatataggcgatcgtacttttcagggatacgccgtctacatcaccgatagagaaaaggtgttcagcccattctttttcctgttcatatacttccaggaaaatctttgtcgcttcctcttcgtactggtaagcgatttccgccatttctgggtcatctttacccatctgccagagtcggatcttgctttgagtgcctttctggtgaagtgcttcatcacgggcaatcagacgcatgatcttcgcgttaccttccatcttgccttgttcggcaaagttgaacgtgaaggtaaacgacacgtagaagcggatcgcttccagagcattgacagcgtgcatacacagatacagagcaaccttgcatttacgcatttgctctttgcgtttcttctcgtactctgcgatcgattcgtctgggtatccgtgggacgttaacatttcgattttgagcacaatgtttttcagttcatgacattctgcgatcagatcatcgtagtattttgtcatggaagccgaacgtttcatgatcgcttcgttgcgcagaattttatcgaactctttcgacggatcgatgtgtaggttacgctgaatgtgcgtatagctgcggctatgaattgtttcactgaacgcccatgtttcgatccacgtttccattgagacatcggaagcgatagggaggaacgccaggttcgggccgcgtccctgaatggtatccagcagggtttgatattgcaggtttgaatcgaaaatgattttttcgtgttccggcattttcgcgtactgcatacggtcgatagacagatccacttcttccggtcgccagaagaatgacagttgtttttcagtcagggtttcgaatacacggtgtttctgttcttcgtatcgtgctacgcccgtatcctcaccaaagaacataggctgttctaagtgtttgtgatctgggtttgtgttcattacagttaacatggatttaccttataaaaagcccccgaaggggcattgaatcaaattttgcaaccttcgcaatcttccgcttcttcctcacctgcaccatcgcgggtgttgtggtagtacagcgttttgataccgaaatagtttgcatacagcagatcttcaaggatgatttcagatttcactttaccatctgggaagttagccggatcatagtttgtgtttgcagagatagcttgatcgacaaacttctgcataaccgctacgtgcgacagataacctttgtttccacgttttgccattgtccagagataatcatagaagtcaatctgattattctggtttggtactacctgattgaatgaaccttctttcgaagatttcacactcacagggccgcgcggaggttcaatcccgttggttgagttacttacctgcgagctactttcacaaggcattaaagcagaaagcgttgagttacgcaagccatgttttttgatttcaccgcgtaaccattcccaatcgcagttatacacaggtgatgccagttcatcaacgtttttgcagtaccagtcaataggcaacagcccttgtgcatatttcgtttcgtggaacagtccacatgcaccgcgttcctgtgcgagttccatagaggcaaccagcaggttaaattgaaacgcttccatcaactcatgaacgtttccggcgtatgcttcggagtagtcgcaatagttgcttgccagccaggatgcatagttggtgataccaacgcccagagaacgacgctgtttggctttcagagccgccgcaacagggtagttctggtaatccaacaggttatccagtgcgcgtactgcgatgcgtgtaagggctgggaattcgcttatatcggcattatcgagaacgatcgccataagcgtacacagtccaatttcgccagccagtttatcatcgtcatccagtggtgaagttgggatcgcgatttcacaacacaggttcgacatacgaaccggaacagagaaactaccctgctggtttacgtgatgactgttgaaaatgtatttgcgtccggtctgtgcgcgttcctgaacaagcaactggaacagatctaccgctttaatacgtttcttgcgtaccgttgggtctttttccagactggtatacagttcttcgaactcactctgatccgcttgatagaatgcgtcatagaggcgatcattcgcaacgtcagggctgaacagggtgatgtaatcgttattgattaaacgcttatacatcaaatcgttaagctgtacgccatagtccaggtgacgaatacggttttcttcaacgccacggttatttttcagaaccagcaggttttcaacttcaagatgccagatcggataatacagggttgctgcaccaccacgaacaccaccctgtgaacaggatttaaccgccgtctgaatgtgtttccagaacgggataacgcctgtatggactgcttcaccaccacggatttttgaacccatagcgcgaatgtgtcctgcgttgacaccgatacccgcacgttgagagatatacttcacgatcgcggacgtaacagcgttcagagaacccagagaatcacccgattcgattacaacacaactggagaactgacgcgtaggagtacgcacacccgccataataggcgtaggtaatgacagtttacgatccgaaatcgcgttatagaagtcaaccacatgactgattttatcagcgtgtttttcgtcctgatgcagacacattgcgatcagcatgaatgcatactgtggtgtttcgtagatgtcaccggacgtgcgatcctgcaacagatatttcccgatcaactgctgaacgccagcgtaagagaattcaaaatctttatcgtgattgatttttgattccagataatcaatctcagcaggagtccattttgtcaggatttctttatcgtattttccagcctcaaccagcttagtgatgtgttcgtagaacggaatcgggtcaaactgcccgtaaacggttttacgaagggcgaacatttcgaggttagccgctacatactgccagtcaggttcttttgcggagattcgatccgctgcatacttgatcgctacagcctggatctgtttggtagtcataccatcacgaagcaggtcaacgacactttcaaggaatgcgttaacatcaatatttcttccaatactcgcccaattaaggactttgaacagtttttctttttcgaacgtttgacttacgccagaagacttcactactgttttaatatcactcattatcttaccttgttaagaaaggggctttcgccccctttgtttatactgccatagctgcttttagcgagccgtggtgattatagtctttcaaatggatggagtcaaagaattcttgatccaaatcaagtaagctatttaccttcggcatataaagggtcggaagtggaagcggtgcgcgttccggcttcaacaactctttcgcttgttctactgcgtttttgtagatatggacatcaccaccagtccaaaccagatcgcccacttcatacccgcaaatatcagcgataatatgcgtcaggagagcgtaggaggcgatattgaacggcaaccctaagaagacatcaactgaacgctgataccactgtagagacagtttaccgttgattacgacgaactggaagaaacagtgacacggacgcaaagccatatcatccagatccatcgggttccaggcagaaacgatgatcccgcgatcgtctggtgtggttttcagttgttcgatgatttttgcaatctggtcaacaccataaaaagaaccttcctcaccaaacgagcgccattgatgcccatagatcggccccagataaccatgtgtataacccagcgctttagcctgattttcgtagttatcgtcccagatcgtccgcttatcgctatcttcaccccacgtcattttacgcagtgtttccacgttggtagaaccggacaggaaccactgtaattcatgtttacacggtttgaagaatagctgtttgctggtagtcgctgggaaaccttctgcgaggttccaacgtgcttgcatcccgaagatgcgcagtgtaccaacaccagtacgatcggttgattcagtaccgtgtgttagaacggtgttgacgatatcaagatattgtttcattttatgcctttttcgtatgtcggtcgacgataatttttctaacgcgttcgtttgattcgatttcttggactttgaaatcagtcagttcatatttcagaaccgcttcacagaattcaggaaccgtgaacgaaacatcacgtttaaaagctggcgcattgaaagtgtgatgtccgtaaatgtgcgtcacaaccacttcatcaaccagtgtattattgattgcttccagaagcaaccccttaccgccaatgagacacacatcacgatctggatgcgttgctttcatcacgtcgattgcagcagacaacccgccgccgtggatgacgtaatcagcaacatcgccttttttggttttgaggaaactaccagaaccagacagaacgcagtgaattcgtcctggcaatttaccaggaagagaagtaaaagtgttcgcacccatgatcaggacgctatctgcggtttctgctttgaagttctgtaaatcctctttgcagtgtccccacggtaaaccctgttcataaccgaaagcatagtccatttcgtacatatcatgaccaacggcgaaaactgcttttactttgctcatagcgcgatccacattttgttgtcttcaatagtcacgatgtagcccatagcttcaaccatgacgcgcaatttgtctttacaggcttcattgtacccgcgaatcttttcaaattcaacagaaaagatattcaatccgttaacatgagcgttaatgattttggattccagatcgaacaccatcacatctaacggactccattcaaccgaatgaagtttttcgcgggttaacagggttgtgtgttttggtagtttcattggggtacagtttgccataaccattgttccattttacgtaaatcttcctctaacggagtgaacccaaaggattcttcgatcacaccgtcttcccatacatcaatttccagaatttccgttaccggagggtttgacatcacatgatcacgacatgcagccatagcggtcataatggaatttgttactgtcagggtattgccctgaaccgatacctgaataatcatactttcacccattctttatctttagtccatgcggttttcaaggtaaaacgctggcggtaatgcatacccaaacttgggggatgcagcgaattgataccttcgacggcgatccgcattgcttcgaacttctcgcgatcaataaactgccctggtagaactggcattctcacacagtcccattcgtaagtatcgctgatctctttactggcattaaccagaatttcagcaatgtcaaaatctgtaggtgcgaaccatcccagattgataaacacgcgtttttgcgtaccttctttcaggttttcaaagtgcgcccatgttggacaactcatagtattttcctcataaaaaagggaactgcttttcaacagttcccattatagcataatcagttagtgtttcaagcgccaaagagcgattgcttcatcaactgcttttttaatttcttccggcgtgtctttgcgtccggctttaaccagggcagagagcatagaacgaatggttgcattcatctgtgacttctcacgatccatctgtgcctgatgcgccttatcaaccgctggggcttctttcttcgctgcctgtggtttcgtaggctgtgcgcctaactcgtccttagcttgcgtttcagtgcgtttctgttcggcttctttcttcacatgaggtgctgagaatttaccagccttgaagttatcacgcataccttccaggatcttacgggctgtgtaccagtcagcaacaccacgaagttgtttcagggtatcaaccagcaaaccgatacttgcgcctttgctatcctcgtcaatgtcgatatctttcaaccattcaacatgtttctgaccggagtgcatgaaatcaaagctgctgaaactccagaaacctttacggttgctgatctcgcgtttgaagtggaaagtcaaacccgcgccgttatcaaactcaccgtagttactgcggaatgttgcccccgcttgtttcagtgcgttgaaatagtcatctttattgatgcgattaacggtgcgttttggtttctcttccggcgctggcgctgctgcttgctgtgcggtacgtttaacaaaagatgctgaacgatgccccgctgcaaactctgcgttcatccggtcgattaccgctgcgatgccgcttgcgtctggttttactttctgcatttctttgaaagtgtcgatgatcatatccagacatgcaccgtcttcatcttccagcatagtacctttcagacgttcagcaggtttgaatttgttcacagttgggtcaacaacatactggaacacatacgcgcctttacgcatgaatacgtgacggtagaagtgaactttatagtgtccaacatcaacaataacatcgttaccgctaaccttcgcacccaggatacgggcaaaggatgtcatgtagtccgcgcgtttgaacttgagatccttcttagtcgggctaaagatggattccagtttcttagtagggaacaggctttccggcgtgattttgtctgggttcttgccccattggtaatcacggcttgccattttgtgtttcttcgtaccaaccagaaccagagtattaactgatacgctacccagtgcggacgcgtccggcgctgctaaaccttgaccgttaggcggttgacaagagaaagagaagtcaaagaacgcatcaccagaagtgaaacgataggttgcgtgaacagtatgaccgcgaacttcgctgattgtctgggtataggttgttggttgtccggtgaatttcgtgaaatattccgcaaattcttgcgcgttgaatttagtgctgaaatagtttttcgccagcacgaaatacgctgcaaatttttcttcccacgctttcttgtttgctgcgtgttctgcgcgaacatcactgaaagttttaccagcgctgtttgttttggttacaacgtcatacgcctggttgattttctgcatgagttcagtgctaccaccacggtcggggtgattgcgcagagaagcacgtttaaagagctttgacagttcagctttagattcgtcgccagtagcgcccaaaatcttcaatgcttcgctgtgtgacatttgttcgttaatcattttccgttcctcaaaataaaaacccgtgcaactcagtacacgggcgactttaaggtatttatgttttactgtcaatagattttttcgaggaaccacaccgaagatttattattcttgatgcgggtcaattcaatggggttatctttgaatgcttcctcaacatctgccattgtaactacatgtttttcttccaatagttcattatggagataaaacctctccacttcgggagaggtctttaaatcaaattcacgttctaacatgagatcgccatatctttgattgatggttttgtgaaccgtccaaccttagacatgatgatgtggcggtcgaagtcctgcggatcaagatcctggtgactgattacaataacgttaccatctacagaatccagcagggatttaatcgcgaatgaaccctctttatcaagtggtccatcaaacacttcatcaagtaccagcagagacagatccacgcctgatactttacttgtcacgtcacgccatgtgaacagaatagacaagttgatgcgagcgcgttcgccttgactgaatgacgcataactgaaatcatcgcgccccagtgatttgatcgattcgttgaactcgtcatctaaagtgaactgataatcagcacccaacagatccagataatatgctatctgtttgttgaagtacggaatataacgcttaacgatgctcgctttaacgccggaatctttcaacatatccgtaacaataccacgaatatatttttccttgacgtagccttgtcgtttttcgttcagttctgcttcctgctgttgcaactgcttcacgggttcttcatcaatgactacttccgcgcttgcctgttccatgatcgcctgtgcgcgtttagcgttggcaacttcgttttgcagagtacctttcagggcttcatatttggttttcagggcattgagtgcgcgttgctgttgcagcaagtcattcatgatcccttgtaactcgtcctgtttggttttgatcagggttaaacgttgtgtacccgctttgatgttctctgcgatctccgccatacgctcaggagtgggtttaatcgcttgcttacaggccggacactcaccgcctttctgatacatcacctccagctttttaaactgttctacagtcattgagagccgcgaataaccgtcacggagtttgttgatatcttccgtccggtcttctccagtgatcaccgattccgcaatctccgcttgcaactgcataagctgtgctttgatgttctttgcggtttctacgtggctatcgtagatctctttgtatcgggcgttgttctggtttgctttcgctcgctgttcgtcaatgaagcgctggtgtgttgcgatctgctgctggatgtgattaccctgcattgagagtgtatccaactgctgattaacaccgcgaatgtatgacttgtttaacttgtccatttcactgatgacggacagagacagcaaatcttcaaccagtttccggcgttcgggggttttcagttccatgaatggagtgtagcccgctgtaccaagaacgataacctgtttgaagcccacaaggttgatgttcagcatagattcaagctgtgcctgataatcacctgctgtggagtcttccggcaacttctcgccgttcttccagatctcgaacaccttcggcttttgtccgcgcacaactttgtacgagtctttcccgtattcaatttccagttcaaccaggcatttctttttgttgacgctgttcaccaactgcccgacttttagatcgcggaatgacttaccgaacagggcataggttaaagcctcgatcagtgtcgatttaccgccaccgtttttccccgtgatcagggttttctttgctgtatcaaattccagttcgatcggggtgttcccgaccgacagaatattttgatacttaatttttttgaagtttagtttcatttaaaatccgttcacataattcagtgatcatttgaacaactgatgaatcaatactatatgatagagtatcgtcgtccagtgtatcaagcatgaatattgaccatgttcgtgatgaatgccatgcacccttcatgatggtcaaacaaactgcgctggtttcccctgcttcgtcggatgtggaaatgatgtgtttcattcccaacatacgcaacaggtgagaatatcggggattcgccccgaaatattcatcataacggctatgcacttgacacctccgcgtatagttcgctgatcagcttattcacttcctctttttcatcgtcggtgatctgcatgttggcgatatactcagtgataaggccacgaacggttttgatttcaaagtcggtatcgacatccgaatctgtttgaactttgtctatgatgttgatttcataggcaatttcttcaattttggtttggaactttgcaagcccctgatcaatttcgctaacaataagacgcaccgcacagttgcggaactgttcgagatcaacatctttctgtgctggatacatgatccggcgatggtgacacacagggttagcgatgaaagtcaattcaggcttgcccgtgaacacatagaatccgcgtgtttcgtcttcgtcgtttgcgctcatagtcagaggcgtaccgatataaaacacgttatcaccctcgttagcgtggtgatagtgtccagagtaaacacgatcgtacttcttcaagaaatcaggttccagcccatgatcggctttgctgttcttgtagaaatagtaaccagacagttcgaagtgtcccaaacaaaagttagctttcgattgtttgatgtagtcaaaaatacgctggctgttttcctgacaaatccacgggatcaggtcaatcgaatttccgccacctaaatcaaccgtggtcggttcgtcgatgacattaaagcattcgtattgacttagtatctcgcgtggcgcgttggggcgtattttgtccttaaattggcaatcgtggttgccgacaagaacatccagagtgatccccgcctcaatcagaagaggaaccagcttttcacgaacaaaattcattgtcgtttgtgtggttgcttttcgaacgtcgaagaagtcgccagcatggaagccgcgcgtgatcccgtgttctttgcaatactctacgatctgtttgaataccgcatacaggttttcttcgttccaggggttatcctggcgaagtccggcatgggtatccccaattaaaacatagttcatataaacctcaaaacccccgaaggggtttatttgccgtatttttcagaagccatgatgaacaggtctttcaactgctggttcgaagtgatccacatcgtttcaatcagttcatcgttgtatggttgcttgagcatatcacgcatctttttgatcgcgtatacgtactgctctttgttaccttcgaagagtgcgttctctgcgtgtttatgcagtcgcttccattccgctttgttcttccgcatgaacttttgcgctttgcgtagggcttcctgttcaatgcgtgtacccttgatggagtccagttcttcttcacgaagatccagcgctgatttttggtgtacttcgtcgattacttcatgctgcacgttcatagtaagtgatctccatgatcattgtttcggcgtttattacatagtccagacgaccttctgttatctggaagtctggatctcgtacatctgtagggtcgatgataatcggaatccctaagctctgcaactctaatttcacaaggtaaggaagcagatcaatttcgtcgttagcatctgctaaaattttgttcaggtcaattttaattttcatagaaacatttccaatgttggcgattcgtccacaacctcgattttatctttgggttttttcgcggactcttcatactgattaagtttgtcatggatatcctgaatgaaagtttcatcggctatcgtggtcatatcagtatcatcgctgtcatagacatgttccaggaagtatttgtatttcttcgcgttctctttcttctcgtagagaatacgagttacaaacgcttgccagcaagccttgttgatgtaaccgtagacgtttgtatatttggtttcgtcaaagttatgaaggccggaaatcgttgccgaaattccatcatcgatcatatccattttccagtcttcggaataacggttgaagttgtatcgacgtgccaaaccgtgagcaatgttcataatcgcaataccgagttcatccggcatcttacgatcaccagtttcacggatttgctgtttccacttacacataactggatacagcttatcattatctgcataaatctttgtagtcattatattctccaaattgaatacattcattatagccgattgaatcaggtgtttcaaacctacttccaatctatattatttaataaaatcagcgcgaagcgcttccgtgagcgaagcgaaacggatagttaaactggttaaaaagtatacggaaatgtactgttttctctatatataaaatataaaaatattaaaacgtacattcagtacatagacactcactacgttcgtgtccttcgcttcgctcagatttttgaaatgatctattgactttgaaaaagtgatcactataatcagtttcattcaacaacaacgaggtattgaaatgtcttcatttgcaagtatgttcaacctgaacagcttaatgagcaatgacgatgatcctgttgatgtgatgtgtatagatatttcaaacctttcggtagcaacgttgatgaacaacttcaagccgaaagaccagaatgacatcaaccaacaaattgttcgtcacatagtgcttgacaccattcgtcacaatgtggttaaattcaaaggcgagtaccctgaaattgttctagcctttgatgataacaagtattggcgcagaagtaaagcctggtactacaaaaagaaacgaaaaatggaacaagaagcatcggattgggactgggatcgcctgaatggtttccttcacccgacatacgatgaaatccgtgctaatttaccgtacaaaggtatccgtgttgacttcgcagaagccgatgacgtgatcggtgtggtgacgcgtaaagcggtatccgaaggtaaacgtgtcctgatcgtttctgctgatggtgactttgcagcccttcaaaaatatcagggtgtgcgtcagtggtcgccaacccaaaagaaatgggttacaccgaaatatggttcacctcgtaacgatttgcgcatgaagatcatcaagggcgataaaaaagatagtatcgcttgcattaaaatgcgaaatgactatattgttacgaaggttgaaggagaacgcgccccacaaatcagggctgctgaactcgaagcctggctggaagcggacgatccgaccgtgggtatgcccgaagagtgggcgatccgttacagagaaaacgaagaacttcgcgactttgattttattccgaaagatgttgcaacggcaatcgaagaagcgtacaatgctccaaaaatcgggaacaaagcaaaaatggagaaatacttcatggaatgcaaacttacccgtatgtatgaaaaactaagtgacttttgaggtaacaaaatgagtgtagaattactgcaagaaaacccagacatcgctaaagcggttaaagaactgatcaaagaagcgtcgaacgtgaaaacccagatcgaacacttccagggttctttcaaagacatcaaatccaaagcgaaaacggattatggtatcgacggtaaaaccttcggcaagctgttcaaactgtatcacgaacaggcacgtaccgcgttcgaagaacagaacaacgaacttatcgaactgtacgatgtgatcgataaggcgtaatatgagcgaaatcggaaacaaaaccgaagtcggcttgtatatcgaaaatctggttgcctctgagggggcaacctacatggaagctacgttacaatggatggacgaaaacagcattgattatgctatgctgtccaaaacagtaccgaaagcgatcatcgacaagattagcgacgaagccattaaaaacaatctgctgcgtccttctgtggctaaagaccacgcgacgacgcaaacactggatgatttcatgtgaaatttaaaaccccgtttgacagttcagacgctaattcccgtttgaaaccgatcgcggtatacaaactgtatctggtgatgaaaaatcactttgctgggaagtatgacgcgatcaagtacaaatgggaaataaagatcactgaaaaagcgttcgaaaagagaagagataagtattttttcaaaaagttagccgaaaggtttacattcaaagaaatatatcttatacttctctccaacatggtagctaaccccgacttctgggtcggggatgtagacgaagatacgatcgtgttttatcgtcaatacataggcaagttgaggcgaattgataatattttcgtggacgatgtaaaaaacctgtatgaattttcccgcatgaaaggtattcccctctcaacggtgtttcagtatagcgtcaaatcatcaacctcgtatatcagcaagctcgtactttctggggtgatttcttatgaatcattcttgatcctcgactcgtttttagacatcataaataaacacgatgaaatcgcaacggatttcgtctggaatgaatttagcaaaaaactaaacgcatacagaaaattagttgaaatcagtaacgaagaaatcgtaaaataccgaaacttaatgaaacaaaccttaattaacttaaacgagaaataacatatgtcattctttaaacgtcaagatccaaccaaactgcaagaacaagtcgccgctctgaaaggttcatccggcttccagaaagatgaaaaagagtggaaactcggtgtcgatgcacagaaaaacggttctgcggtgatccgcttcctgcctaaccgatctgatgatgaactggcgttcgtgcgtatcgtcaaccattcattcaaaaagaataaccagtggttcatcgaaaactgcccgtctacccacggcgattacgatgcttgccctgtgtgtcagtatatctctgaaaacgatctgttcgaaaaagcgaaagtgaaaggcagcgaagccgaaaaaacactgggtatgatcggacgtaaacaatcgttctgggcgaacattctggtggttaaagatccaatgcacccagaaaacgaaggtaaggtgtttaagttccgcttcggtaaaaagatcatggataaaatcactgcggctatcgcggggaacccagatctggatgaaccaggtgttgctgtaacctgtccgtttggtggcgctaacttcaccctgaccgcgaagaaagtaggcgactggcctaactacgacgacagcaaatttggtgttcctggcccaatcaaaggcatcgaagacgaagcgcgtcagaaagaaatcttcgaaggtatgagcgatctgcgtccaatcactgctccagaccagttcaaaccaactgcggaactgaccgcgaagttcaccaaagtattcggtggtgctgcaatgggtgctggcgcaagcgctggtgcggatctggattcagaactgaactcatttgacaacgaactgaaaaacttcgataatggcaaccattccaacggtgctaaagaatctggtggcgtaagtcaactgaacgtaggcggaagcgtaccggaagatgataatacacctccgtttgacctggaaggtggttccggtgatgacgacctggataaactgctggatctgtaatgcttacgggggcgaaagcccccaattttgaaagtttgaggtagatatgaatttagaacaaaacgtatatgtagcgcatctgaacaacgttcgcaaatcctgggtaggtaaagtgccggaaaacatcaaagagattttccgtgcgatgcctcaagctgaacgctttgagcattacaaacggatcgacgaagcagtaagcgcagtacataccggactgattcacgacgctcgcgaagcgggtacgaaaatcacagaatccaaaagcaaagaattccttgacaatgcggcggatcgcgttgtagaatccctgattaacggcacttttgcctaattgaaaactataggttgaatatgaaattctctaaacaaacgatcgacatcctgaaaaacttctcccagatcaacccatctgtaatgctgaaaaagggttcgttcattatgacgaaatccattaacagcgtagtttacgcagaagcaacgatttctgacgtaattgacgaagatgtaggtatctacgatctgaactcattcctgaacatgctgaacgttgtaggcactgatgccgaagtaactcacgatctgtccactggcgaaatcgtcattcgtggtgagaaaatgaaaatcgttgagcgttcaagcgatccaaccacaatcgtacagcctaagaagcgtctggaaatgccagttgcggatctgattttccagattagcgcgaacgatttcgaaaaactgatcaaagcgtcacgcatgatgaaactgaccgacctgtctgttgagccaatcaacggcaagctggtaatcaccgcgaaaagtaaagaaagccagtcaaccttctctgtagaagtgggcgattacgaaggtgataacatgttcaacttcgatatgaagattgacaacatgcagttcatcaacagcgattacaaagttgaaatctcttctcgcggcgctgcgaaattctcgtccgaaaacggcgttgcgtatgtagtggtacttgaagcaaccagccagttcaagtaagataaacaaagtagtacacaaggggcgttaagcccctttttgataatcaattgaaggtaatattatggaacttagtgaaaacgtacagttaatcgaaaccaaatacggcaaaatctcccagtctcccgaagaattcgcatgggatcagcgctatcgcccgacgacgatcgatgaatgcattctccctgctgctgataaagcgacgatgcgcggcttcatcaagtctggacgcatcgacaacatgactctggtttctgattccccaggtacgggtaaaacaacgctggcgctggttctggctaacgaagttgatgcggaagtgatgtttgtcaacggttccgattgtggtgtgaacttcatccgtaacgaactggatcgttacgcgtcctctatgacgcagaagaaaggcggtaaaatcattctgattgacgaattcgatcgccctggcatggcagaagcacagaagcacatgcgtagctttatcgaagcgtacagcaagaacgttactgttatcatcaccgcgaacaacatcaacgggattcaccctgcgctgatctcccgttgtccggtagtcaagttcggttccccgtcgaaggaagaacgcgttgaactgatgaagcaaatgatcaaacgctgtttcggtatcctcgaaatcgaaaaaatcgaatatgaccagcaggtgatcgccggattcgttaagaagcactacccagacgcgcgatccatcgttaaagctcttgggttctattctaagcgtggcaaaattgatgctggtattctgtctgagattgttggttcggacatcacaccagtgattgaggggcttaaagcgaagaacttcaaagcactgcgagccgaagcaatcaagtacgcgcctgagtatgaaactttcctggctaaactgctggatgcggtatacccgatcgtcaccaacgaatctaaggttgcactcattcaggcagtaggcgaaaacaacgcacagtacgggctggcggtgaacaaagagattcacctgcaatacctgttcatgggcttaatgcttaccctcgcgtgggaggcttaaaaatgtcactggctgcttttctcgatgaagaagaactgaacgaacatgaagcggcctggcgttctaaagactgggacaagatcgaagaacttgtgaaagagtacaccaaagacaaggaaaacaccttgtttatggtgctcgaagaactgaacaacgggaagacaccattacggatctctgcccttgattcatacgataagtttttcatcgacaatgcaatgagccagcatatcgaaacgctgatccctgcatacacgatgaatatgatcggttccggtttaccagaccaggcgcactttgattattacctgcatacggtgcgcaaaggtaagcggttcggggcgtgggctaaactcaccgaagataacgaaatgaaagttatccttcatgttctccaaaaacgatacggtgtaaatacacgtatagcaatggaatattacgaagaactcaaacagcttgaaaaactggacgagtggaagcggaaaaatatgaaagttgctttatctgtgttggctgatgttgtgaaaaataaaaccgaccagaaaaaggttgaacaactaataaagaaatggtgatgtatgaacatgctcgaaattaaactgtccagcgatgacagtttcctgaaaattcgcgaaacgctgacccgtatcgggatcgcaaataacaaaaagaaaatgctgtggcagtcttgccacatcctacagaaacaagggcgttattttatcgtacacttcaaagaactgttgaagctggacggtcgccaggttgacatgaccgaagatgacgaactgcgccgcaataacattgcgcgacttctggaagagtggggtatggtttccatccttacgccggatctgaaattctccgaagagaacaacttccgcgtattgactcacgcacaaaaagctgaatggactttgaaatacaagtaccggatcggacattaatcaaaagcccttgcagaaatgcaggggctttgttatattggttgtacaccacttgtgaggactaaattatgaaaattcgtattgaagaaatccttaactctctcaaaaaagaagaccacttgattacccgtctgcatcgcgacgaaatcgatctgtctctgacctgcaatctctcggatctgcgcacgtacaattacgcgcagaactacttccctaatttctatacccgtatcatgaatgaatatacaatgctggtgaatcagttgaattcgcttgagggacacgaaaaacttcgtgaatctgcacagcgttcacttgatctgatcaagctggctggggtatcattcctgtcacgattaaacacggagaaagaaaaccgtaatgaatgaattttatctatccgttgagcaaatgggcgatcacatctacgagcgcttcattggctctgagggacgcgaacaggttcgcaaaacaaaatatgcgcctacaatgtttcaacacgctatggcgggtgtagactcgccatatcgcgacatttacggcaagacctgcatcaaaaagaaattcgaaagcatcaaagaagcaaaaaactggatgcagcgaatgaaagatgtaggcatggaagcgctaggcatggatgatttcaggctggcgtatatctccgatgcctacagaaaggaaatcgaatacgatcgcgacaagatccgcattgcttcacttgatatcgaagttaccgcgcctgaattccctgatccacgcgaagcaaaatacgctatcgacgcaatcacccactatgacagcgttgaagataaattctttgtgtacgatcttgtcgagggtggtttagatgaatgggtagcgtcaaaagttgataccgaaaacgagatcagcgaagaagacttgaagaaaattgtttaccgttcattccagaccgaaaagtcgctgatgtcggcttatatcaaagactggaaagagcggacacctgttattgttacgggatggaactcaaacaagttcgatatcgcgtatatcatcacccgttacctgaatatcttcgggcaaaacgttgttcgtcatttcagcccgttcgggaaagtgactgcgaagacaacaaccgaccattacgggaacgaacaactgggctatgagatttacggcgttgctcaaatggatggaatggatctctataagaaattcagtttcaccccgcaaccaacttacgctctgggcgcgatcgctgagttcgaaacaggtaaaagcaaagttgattacgaaggttcgctgtctgaactgcgtcaagcggatcaccagaaatacatcacgtataacatcgttgacgttatccgcgtgttggatatcgacggtaaacgcaactttatcgaactggttctgtctgtagcatactacgcgaaaatcaatttccctggggttatgtcaccgcttaaaacgtgggacgcaatcatttacaactctctgcgtgaagagaagaaagtaatcccagaaaacaaacgccatactaaaacgccgtatgatggtgcatacgttaaagatcctgttgtcgctccataccgttacattgtatcgttcgacttgaccagtctgtatccatctatcatccgacaggtgaatataagccctgagacaatcgctaacagctttgcagtgcgtccgatgcatgaatacatcaataagactgcgccgcgtcctagcgacgaatttagctgctctcctaacgggtggatgttccgacgcgatgttaaaggcgtgattccggtcgagatcaagaaagtatttgatcagcgtaagacgtggaaaaaacgaatgatggcgggtgagcgaaatctcgaactgattaagcacgaactcgaacacctgacagacgcgcacaaccaaatgatcaaccctgatttcgagttctacgaagatttcggtgatgaatcaaaagctgtactgaaaacgctgtctaagcaaatgcttaaagccgtgaagaaagtgtgtgagaagaaaatcgcacaggcgaacaccgcacagcttaaccgtaaaatcagtatcaactccctttatggtgcgttgggtaacgaacatttccgttacttcgatattcgaaacgccagtgcgatcaccatgttcgggcagttggctattcagtggattgagcgtaaggttaacgaataccttaacgaactgtgcaacaccacggattacgcatacgtgcgttactgtgacaccgactccatttatgtttgtatggacaacgtgatcgcgaaagtcggcggtgaaaataagttcagggataacaaccattgggttgacttcctggataagttcagtaaagaacgcatggaacctatcattgataagggctaccgcgaactgtgcgagtacatgaacaacgtcgaacacctgatgtttatggatcgcgaaatcatttctggaccacctctgggatcgaaaggtctgggtagtttctggacggctaagaaacgatatgcggctaacgtatgggactccgaaggaacccgctacgagaaacctaaattaaagatcatgggaatggaaacccagcgaagtagtacaccgacagcggttaaaaagttcttgaaagaagcgatccgtcgcatcctgcaagaaggtgaagaatccttacacgaacacttcaaagtatttgaagaagagtataaggcgcttgactaccgcgaaatagctggtgtatcatctgctaataatatctcaaaatataatgatggtgctggcttcccaatcaaagggacaccaaaccacatcaaaggcgttctgttctttaaccgccatacgaagggtattcaaggaatcaccccgatcatggaaggtgaaaaggtgatggttctgccgttgcgagataaaaacccgtggcaagctgattgcatcgcatggcaatccggtacgcgtttaccaactgagatcgaagaagatattttgaagtgggtagactacggcggattatttgaaaaacatgtgattagcccgttgcaaaacatcacggaagcatgtaaaattgattacgaaaaacgcgcatccctgaacactctgtttggtgatgactggtaagacctgacggggcagaaatgccccatttatataaatttgtgaggaaaatattatgcgtgtatataaaccggaaaaataaatgtctaataaagcactcctgaaaaaactgatcaaaaactcgaatagtcaatctgcgtcaattctgtctgaaagcgatgttttcaataacatcaccaaaactcgaactcgtgtaccgatcctgaacctggcgctgtccggcgctttcgatggtggtctgacttccggcttaactctgtttgctggcccgtcaaaacactttaaatcgaatctggggctggtgacggttgcggcgtacctcaaagcgaatgaggatgctgtgtgtctgttctatgattcagagaaaggcgtaactaagtcttacctgaaatcaatgggcgttgaccccgatcgtgtggtgtatactcgtatcacgacagttgagcaacttcgaaatgacgttgtaagccagcttaacgcgctggaacgcggcgacaaagtgatcattttcgtggactctgtaggcaacaccgcgagtaaaaaagaactggctgatgccctgtctgacaacgacaaacaggacatgacccgcgctaaagcacttaaaggtatgttccgtatggttacgccttacctggcggatctggatattccgatggtgtgtatctgtcacacatacgacacacaagaaatgtacagtaagaaagtcatttccggtggtactggtctgatgtattccgcagataccgcgatcatcctgggcaaacagcaggtgaaagaaggtacggaagttgtcggttatgacttcatcatgaacatcgagaaatctcgcttcgtgaaagagaaatccaaattcccgcttcatgttacctatgagggcggtatcagtatgttctctggtcttctggatctggctatggaaatgaacttcgttcagactccaacgaaaggctggcgcggtcgtgcgttcctgaacacggaaacgggcgaacttgaactggaagaaaagaaatggcgtgaatcggaaaccaactcgatcgagttctggaaacctctgttcactcaccaaccattccttgatgcgattcaggataagtaccgtattcctgacaaagagatcactgacggggcagcactcgaagatctttattctgacgatgaagtagaaccgtcaaataaatttgatctcgatgacgatatccctgatgatgtggatatgtcagaagagtaataaacaactgggggctttgcccccttttaataggtgaatcatggacattgaacaaaaaacaaaaaacattcttgatgaagcaatgcaggacgttattcaagaactgttgatcaacgatgaaaacgatgttgcacacttagtgtacatccataaggtgtattgggataacggcctgaaagtcgaattcagtacgccggacgaagacaaagaaaaactgattccgctggttcacgatgcaatctacgcgcagatcaagcctaatctcccaaagcctgaaaagaccttatgggcggcgttgaaagtaaagctgtataatttctttcagatgttcgctaatctggtttaagaggtaataatgatcgtcgaaacaatattttcaaatctggtttttaatggtacgtattttgttcaggcgtggccccatttacgccgtgaatatttcgaagggaacgcgcagattctctttgatttgatggataagcacgtacaggaattcaacagcattccttcacaaactgctttagaagtagctctggacaaaaagagcctgagtgatgtagtctacgaagataccaaaaagatgatccgcagcatgaaaaatgcgccggaagatctggaatggttgatgaaagaaacggaaacctattgtcgtgacaaggcaatgtatcgcgctctgtcccgtgcaattgagatccaggcgaatgctgaaaaacctgctggcgaacgcaacaacaaaattcctggcgttggggcaatccctgacatcatgacggaagcgttagcgattagcttcgatagttcggtcggtcatgattacttcgaagactatgaaaaacgctggatgctttaccagtccaaagcgatgaagattgctttcaatatcccgatcctgaacgccattaccaaaggcggggcggaacgtggtacactgaacatcttaatggctggtgttaacgttggtaaatctctggggctttgttctctcgctgctgattacctgcaatcaggtaaaaacgtcctgtatatcagtatggaaatggctgaacacgtttgttctaaacgtattgacgctaacctgcttgatgtgccactggacgatatcgacaacgggaacatcacctatgcggactataagaaccgtatggaacgcctcaaacagtcgaaggtcgggcgtttaatcgttaagcaatacccaacagcaggggcgaacgctaaccactttaaagcgctgattaaagagcttaaattgaagaagggtttcgtacctgatgtgattattgttgactacctggggatctgtgcttctacccgtgtacgcggggcggaaaatacatacatcctggttaaagcgattgccgaagaacttcgtggtttggctgttgaaacaaataccgtaatgtggactggtgcgcagactacccgcgccgcgtgggatgcttctgatatcagcatgggcgacgttgccgaatctgctggtcttccggctaccgctgactttatgttagctgtgatcgagactgacgagttagctgatcagggcttgcagttgttcaagcagatcaaatcccgttacggcgataagaaccactttaaccacttcaaactcgaagtgcgtaagggtaatcaacgctggatggataccgacaacagcgatatcgggttcaaatctgattataaaggtcgtcagatgccgaaaactgttgaagaagcacaaggtgctatggtaaaacaagctgagactaaccgaagcaataagttagccgaaattgcaaatagtacagacattcaattttaacggggcttcggccccctccaaaggtatagtgaaatgaaaaagattctcgttattgtattcctgatcctcctgtctctgaaactggcagcaatcggggttatggcaaatgcttcctggtggcttgtatttgcgcctctgatcgtgatcggtgtggttaagctggctttctgggtgctgtttgtggtggcaatggcaaatgtattccctaaactgactctctggattgcaaaaaacgcaaaataatcctgattaggggttgacgggagttatgattgtgataatatgactcccgtagacaacaaaaactgattaggagataccaaatgaacgtactgaacaacccatacgacgaagtgatgaacccagaactggatttcagcgcgggttatttcgatgcagtagtgaacagcgtagtaaacagaggtttgctggttgaaatgctgaaaagtgggaaagcagatgttgaaggtagtgttgatttcctctggggcttcctcccaatcgacccagaattcaaactctgctgtaacgaagttcaggccaaaaacgttcttcggtatttaatcaacaaagcataaaaattaagccccgaaaggggcttttttgtatctataggtattgcaatccttctcgaaaggtgataccttattctaaacaaacaaaggaggacatcatgaaacttgcaatcgcttttatcttactggttctaaacgcacttatgggctttccgttcccgtggttggtgcttctggctatcccgtttgcctggaacctgttcagaatcggtttagcgggttgtgttggtgtcctgatgcttatcatcggcgctatcggtggcaaagacgcttttatcggtgttctgaaagccatgaaagagggcgttaaagaagggttagtgaaatgagtgatttattagatatgattcttccagacgaagaacaggagttcgaaagcccgtatcgttcagaatggatcgtatcggttgacgacaaaggctatgttgatatcatgcgctggcctaatattcatcctggctatctggacgaaggtatcaatgcggaagtgctgggtatgcctgaacaggttgaagatcctgctggggtgtataagtggatttgtagcccgtgggaaacccgcgactgggaaagcaatattgttgatgattggggctttgatgtggtagaatctacccctctgttcttattaccggaaaaagccaatggcgaagttaacgaaagcggaaaccaaacaacacaacaagataatggatctggtggagtctgataaggcgctaacctacgacgaaaagttattcattatcgaaaacttccatgaaggtgcatttacgaataactctgaactgggcgcgttctttaccccgatcggacttgctcgcgatttcactattgatgcttgtaccagtggaagcgttgttgacctgtgtgcgggtattggtgggctatcgttcgcgatgcttcatatgatgatgtacgccaaaccgcgtgaaatcgtctgtgtcgagttaaaccatacatactataagttgggtaagcgtatcgtaccggaagcgacctggattaacgcagacgcgttaacgacggagtttgatactctgtttgatatggcgatcagcaatcctcctttcggcaagataaagacatccaattttaagggtaagtatacgggcgcggaatttgaatataaagtgattgaacgtgcttcacagattgcccgtgcgggtacgttcattctcccgcagatgtccgcgaattttcgttactctggacggcgttatttccaacaggacgaatcaacgacaacatcgaaatgcaaaaagtttctcgatgaaactggccttgaaatgcaaccaggttgcggcattgataccggatactatctggaagaatggaaaggcgtgaaaccgatgtgtgaagttgtctgtatggaattccccgaaccggagccagaacccgcgcaaaaccttttcactttcacaatagagtaaagactatgagcgatcaattaatcaaaaacatggatttaacctacagtgtgcgaatgattcgcctactgaaaaagccctggactgaatggacggcttacaagctgggtatcatcgacggtcaaggggaagtattgaaaaacccgaagacgaaggaagaactggaagcatattccccattccatcgctctgtaaggcacatcaagcgccgtttaaacgcggttccttatatgtctgggttcatgaaccttacgagcgcgtatgactcgttacggagccgctggaacctgaccgagcaagaacatgaagagatcatgatgaacctcccagaacttcgcgaaagactcaacgaagaaatggttgcaggtgattcaggcggaagtgtggataatattgcttcgggtgtgactacaggcgcgatcacgaacaaagggccgaaggttctgggttctacacgtccgcataaacgcaaacgtaaaatcatgaagagtgaagaatgaaaccattaccgccattgaattatcggatctgggttactgcgaacaattacacctggtttcctatccgtatcaagtacatgagcgacacagcgatcgtgtacacgaacgaaagaaaaacatcatcgggtgtcgatattcctagaccttatccgttttataagatattctatgaatggaaaatcactttagacggcacagagaaagaagttagccgatagaggtaaacatgtatcttgatatagagttcgcaactcgtatcatgggatcattaccacaaagcgaaatcgttcgacggggtggggaattcagtatccattcccgttgtccgatttgtggcgactccatgaaggataagcacaaaaaacgtttctggatattcccgtcaaaacgaggcacacacatgatgtgtggttgttttaactgcaactacagcaagccgttttctgtgtttctgaaagactattacccggatgattacacggcgtatttgatggaatctttcaaggatcgtaaagatttaaaacagacgcacgaagaaccgccgaaggaagaaaagaaatatattcctgaattgcagttctgcgaacgtctggacacgttgccagaaaatcaccctatcgttaagtatgttgcaggtcgtcacatacctaaagacaaatatgatcgcctctggtttacgcgtcaatggcaacacctggttaactctgtgaatgcggacgcataccctttaccgaaggatgaaccgcgtttggtgatccctatctttgatgaaaagggtaaaatcgagtcattccagggacgcgccttgcgtgacaatgccaacgcaaaatacatgacaatcaaagcatgtgaacactcaacgaaagtgtatggtcaagataccatcgatccgttgaaacctgtctacctgcttgaagggccgctggatagcctgtttgtagataatgctggtgcgattacgggcggacaaatggcgctgtccgatgttccgtataaaaatatgcgtgtctgggttcttgacaatgaagcgagacaccctgatactactcaccgccttttaaaattgattgaggctggcgaaaaggttgtgttgtgggacaaatgcccgtggccgtcaaaagatatcaacgaaatgataaaaacggacggcgcaactaaacttgaaatcatgcagtatttgaaagataatactgtttctggactcacggcgaaacttcggtttaagtcgtggaacaaatcaccgaaaaaatgagattgatatgactgataaaactcctgtgtttaatagctgtgcgcacctggttaaagccgatgatctggaaatggtagaaggtttctaccgcaatgcattacagaacggaattgacccgctgcaaaagatgctggacttgcaaaaccatgcacaacaaagcctgtctgataccctgaattgggttccacgtccgaacgaactgaaaacgtgcggtgagatcctggactggctgaaactgcaagatgatgcgatcgcagacgaaacccgcgaactttacaccgctctgggcggtatgtcacgcggtgcaaaagcggcttccggtgtctggaaaccgtggaaagcaaatcaccaggaactgcgtagccaggtattcgcagaaatgaaagaagaagacaagctggaaatcctgtttgaactgattgaccagtggcacttcttcatgtgtaagttcctcgcgctgggactggatgcggaaaccatctacaagctgtatgctctgaaacaggcggaaaacctgcgtcgttgggctaacaactactaatggaactcaccgcgctacatgccgtatttgctttgtcttatatcgtctgcgcggtgataacgtatctcttcggatggtgcgttttccacgttaacggtgttgacagaaaagccgctttgatagtattatcattgctatgggttataggttttttctacgtcatctatgaggggcgaaaatgattgacaaatactatatcattgttacgaaagacaaagacggctttactattccacacgttgaaaacgggaaaacgccggaactgtttgcatcaccgcaacttgcaaaggataagttagactttatccgcaagtgctacgaaagcaaactcaactacgtaccggacgaaccgcgtttcagtttcttccgcaaaaccgagcaactaccagcaaccgaagaacagaaaaaagagatgcgttggtttattgagaattcgaaaattcaaggggtattactcaaattatgagcgagttaacatttgatgatctgagcgacgatcagaagtccgcgcatgatcgcgtgatccataacatccagaacgccattcatacaactattacgggtggccctggtgttggtaaaacaacactggttaagtttgtctttaacactctgaaagggttggggattagcggtatttggttaactgccccaacacaccaggcgaaaaacgtgttagcagcggctaccggaatggacgcaacaacgattcattctgcattgaagattagccctgtgactaacgaagaactgcgtgtgttcgaacagcagaaaggcaagaaagcgcctgatctgtctacctgtcgcgtgttcgttgttgaagaagtctcgatggttgatatggatctgttccgaatcatccggcgcagtattccaagcaacgctgttattctgggactgggtgataaagatcagatccgtccggtaaacgccgatggacgtgttgaactctccccgttctttgatgaagaaatctttgatgttatccgtatggataaaatcatgcgtcaggcagaagggaacccgattattcaggtttcaagggctgtacgtgatggtaagatgctgaaaccgatgtctgtcggtgatctgggtgtgttccaacatgctaacgctgttgacttcctccgtcagtatttccgccgtgtcaaaacgccggatgacttgatcgagaaccgcatgttcgcttacactaacgacaacgtggacaagctgaacgcaacgatccgtaaacacctgtacaaaacaacagaacctttcattctcgatgaagtgatcgtgatgcaggaaccgttagttcaggaaatgcggttgaacgggcaaatcttcaccgagattgtttataacaacaacgaaaaaatccgagtcttagaaatcatcccgcgtcgggaagttatcaaggcggagaagtgcgacgagaagatcgaacttgaattctatcttctgaaaacggtatcgctcgaagaggaaaccgaagcacagattcaggttgttgttgatccggtgatgaaagaccgtctgggtaactatctggcctacgttgcgagcacttataagcgcatcaagcaacaaacaggctataaagccccgtggcattcgttctgggcgattaaaaacaagttccaggatgttaagcctcttccggtttgcacgtaccacaaatcgcaggggagcacgtatgaccatgcgtatatgtacacgcgcgatgcgtatgcgttcgcagattacgatctgtgtaagcagttaatctatgtgggcgtaacccgcgcacgttacaccgttgattatgtataaggggctttgccccttttgaggttattatgaaattgactatccttgtaaaagacattccccgaattcttgaagcactcgataaaattcgagaaaaagatccacatgcggtcaatgtgttcgggatgtatagcgcagcagatccgcaagaagttattcaccgtttgcgcttcattgaaaaatctaacgatattctgtattctccgaacggaccaagttattcatggagtcctattgcaaaagaagtcgaactgacttatgatgaatatggcgttatcgtgctgatccttcgaatggcacgaaacattcgtgaagataaagacatatggacattaatatcatgaaaaaagatatatctatccagatcccacgcctccacgcggaagcgattgcagatctaattttcaaaacccctgttcaagaacttccgcatttcatcgatcgcgatgtgttggacgaattcacagaagctgttgaaaacgcgaaccgtctggaaaaggcaatttatcattccggtctgcgtcagttcggtatgatgactttgcaaagcaaagagtttgaaacttttgatatcaacccagaagttgcgcttacgctggcgtacttcatggaagattataagcggagaacttcatgagtcatttacccgtagattacgtatgggattatgaaacggttggcccttccccgaatgggaaggtgatcgaactctcatacgttccatttgttgacgatccccacaacccgccaacgttcgcggaactggttgcacgggggcgcaagtacaaatttgatttgcgcaaccagcctgatcgtattgctgatcagggaacaatcgcctggtggaaacaacaaagcgaagaagcccgtcaaatcctgaaaccgtcgccggaagatctggaactgtatgcaggacacagacaattctttgaagacctgaaagcggacggtgtgagccgttggcaatcactcgattatgttcgtggtcctgaattcgatcgcggtatcctggttgatatcgtgcgtaagatggttggtaagatcgacatcttcgaagatatgccgaccgtgttctggaatagtcgcgatgtgcgtacatgtatcgaaaaccgcctgttaacgcgtgatgcttcgacctgtcctcttcggaaagggttgcttgatggttttgtgatgcataattcaattcacgattgcgcgaaagatgttttgatgatagtctattcattgagatatgcgctggggctggaagaacccccaagtgaagaagaaaccgatccattgagtctgccgaggaaaagatgattaaattatcatttgtaggtaaaactgtacatgcaaaaacactgaacgaagcgaaagcgcagatgtttgacattctcatgaaccccgcgttcgttaaagtcgaatacgatgaatatgttgttcagcctggcgatagcatgtattcaatcgctgaaaaattatacggttgtggtgagcgctggcagtctatcgctaagttgaaccgcaaaaccgttagcaatgcaagctatatccttccggggatggttctgaaattgcctcagttagtcgaattatgataaaaagcccttgcattcgtgcaagggctttgttattttgtagggactgaaacaaaagaggataaaacatgtttggtgatttgaaagaaggtttgaacattttaatcggattcgcgatcattggtgtgattgcttgtgtgtccggtgcggtgtggttgtcttatcaggcgatcgtgtggttgggcgaatggcttcacattctggcacagtaaggggatattatgcgtttatgtttagttggtgtaggtttcggtcgtgcgttaactcaagggttaatcgactcaatccgctggattcaaccaagcgttgaactgtattcattacctaaccggatcgaatactctgatccaacaccgtacaaaatgaaaccttatcaagcgccacgcgttaaccgtgcgttacaccgtcaatctgtgaacaggggcaaataatgagcacagcaattccacttatagtaatttttgtgttggttgtgctgtttgtcatcttcaaagcaatcgaccaatccatagcaagagaatggtttagcgactactacacgaagaaagcgtttataaaacattttcgaatggaagcagtgtgtacccacgtatacacggagctaaaccaggttagattctcattctcacagaagggaaccgattatgacatcacggtatctctttccaaagcaaaagagctttacgatatcacccaaaacgggggaatccgtagaacacttaaatcattaaaatagcactttttgttaaactagcctcttgcaatgcaggaggcttttttgtatattacacacatcgaaacgaaacagacaaaaggaacgcatcatgaaaaacttagaagccaaagtagttaaagtcctggttaagaacgggttcaatgaaaaagacgcagtagcgatggttgaaaagaatctgaatgatgcgttgaaagttagaccagaagcaaaacctgctaaactcgcagaggtgattgtatgcatcatgtaaaagtaagcatcaaggatatcacggttggtgacaccgtgatccacgaagggaaaatgaagactgtcgggaaaaacgatatcaagcgcgatcctttgtttggtgtcctcctgtttggtgatagtttcaacctggggagaacttttatcgagagggttattttcccgaaatggtatcaagggaaacgggtttaacaaatagcactttttgctaaagacttaacgggatagctttgatatagttatcccatcgaaacgaaacggaaggagagttatcatgatgcagaacggttctttaatcaaaggtcacggcaaattcctgattcagcagatcaacgacaacaaaggcatcatcgcctattgcgaagagaagatgaacagcgatatcgcagcatgggaaaagaaagagtatgcagcagtgaaaaaagccgcagaaaaatcccttgctaaagcagaagaaaatctggctaacctggagaactacgcatgaactacaaaactttcgtgattaccgtcaaaactaaaaatggcgaagactgcttcttgtatcaggcaaaagacgagaaagaagctaaagcaggtgtattgaagttcatcaaacgtgatgcattgagcaacatttgtgaacaaccaaaataatgcttgcaatcctgaacgcataatagtatattacacacatcgaaacgaaacacacttaggagattttaccatgtatacttttgacgaactgaaagccgcagcacagcctttactggacgcgatgcacaaaggtcgtaacactggcatgtggttcagcgattacactgaaactgtgttcgttctggaaaaaggccgtaagtatcaccgtatcgtgcaggatacccgcaacaaagaaacgggtgaaatgttcaatcagcgttcagttgctggcttcatcgacaatgacggaaatatcttgaaagccgctggctggaaagcacctgctaagggtattcgtggtaacatcttcaacaacccagagaacgcgatcgaccggagtggatacgttcgctatcttcgctaaaatcggggcttcgtcccctttggaaattaaaatgaaactatcagcaaccgccagttggtcaatcttcggactgatagccgcaggggttttattcttcgcatggcaatcaagagatccgaacaaagcggcgtatgaagccgcacaacgagtagtagaacaggatgcagaagcacaacacgaagcaatgctacaacagcgtcgtgatatgggctttgtggagactgtgagttacacaaacgcttttggtgatgtcactacgcgctctgtaaacgtcttagggcgcacgaaagggacaatgctcaccatcagacgggaaggaaccggaaagctcgtagacgtgtgtttcagtgcgattacggacgattccaaacgcgaactattcgccccgtatttttctacgcctgtatatgctaaatttgacggcggagaaacaaaagagtttagcgcaagcagaggaagtaccgaagatttcctgtgtattacttccccgcaacgcttccttttcaatatggatcgtgctagtgttatgcaagtccagttagtattcctggatcattactccaaagtgccagaagtgcatgaatggaacctgaaaacatataatgaggttgtgaataaatgagcagacgcccaaagaacagcaaaaccgaaatgttcgcaacgtttgatgtaaacggaaagagcattgagggtaaaccatgcacgaactcaaagtttatgcatatcgccggattgcctggtatgagtgttaaaacttcttactgttgtcactacaacgaagaaaccacctctgtttatttgggcgaagaactcatggctgaacgcgtcatgcaatgcgtgcatttccctggcgaacgtccagaagtgaactgttttattgttggttatcataaaggtattgtaaatgagcaagtataaaattggtgatatgtacgccccgaaatctattttaatggctgtgtgtcaaatggcatcagaagccgatccgattcgtcgtatgtatgatgcgttgcgtaagaacccgatggacttcaattcaccacgccggatcagtatggtgtatgaagaaacagggattctttatcttgaaggtattcccgttcctatcaagttcaacgatatgaaagggcttttcaatccggtatgggttgcaccagaaccggaaactgaaatcaaccacgtcaataaaggtgaggaagtaccgcgcgaaaattccgctgtagttctggataagtttttcaagaccgctcatagcgtcaaaaaacgaaccgttagcgacgtggttcaccacctgtccgcagaggttggggagatctccgaatgtctcgttcagcctcaacgcggcggtgatatcgtcgaagaaagcgttgatgcgatcgtgtgtgcgttggatgtgatttacctgaaactgggtactacccacgggacaacagaaatcgcgcaagtgatcaataaactgcttgataagaaattagataagtggtactctacttgtagttaatcaattacgaggatcggatcatgttggtttatcgcgttgaattgaaagcgtctatattatccaaatatgatggatggtgtaagcaattaggcccgtacacgggttgtgttggtgatgaagacgatctctatgagtatcttgatattcatggaatcgagttcggtttaaacttcggtatctccgagactcgtcaccccgcaccatgcgaagaccttcgtttaatgcgtaacctcaaaaaacatggtaaaaattatcgtagctatattttcggcttctcttcattgcagaagttgtctaaatggttcgatagctgggagcggcaaattttggagaatcagggatatatctgtatggtgtacgaaactgatctcatgtttgcagggaacaaacaatgtgttttcagcaaagccgcaaccccgatccgttttattccattgtcagagatttattaatgccaacatatacctataaatgcaccaagtgcgaaaaagaattcccgaagatgtccagcatcgcgagccgtgacgaaccgaaagattgtgattgcgggggcgaggcgaaacgaacggttgataagccgcagatggtgaaagacggtttcccgtacaacaagtaaaccccgaaaggggttttctttttcatagaaccctatataatgcctgagaactaataaagaggtgaatatgagtttagatttcttaatggacgataacgagccgcagaaagcaccagaagccccgacaaagggcgctaaggtggatgaatcattctgcttgagcgatcgcgatcacattcgcaaacgtccgaacatgtacgtgggttcagtgaacaaagaagcccatgaacgttttatcatgggtaaattccgcaaagtggaatacgttgaagggttggtgaaaatcatcaacgaaatcctggataactccatcgacgaagcgatccgaactgatttcaaatttgcgaacaaaatcgaagtcaagattgatcacaatctggttactatttcggacaacgggcgcggtattccacaagatgacgtgagaacgccagaagggaagattgttcctaaacctgttgcagcctggacaatggctaaatccggttctaacttcgatgacgaaaaccgtgtaacaatggggatgaacggtgttggttctttcctgacaaactgttacagcgcaatctttatcggtgagacatccaacggtaaacgcaaagtcacgatcaactgtacggacggagcgcagaacatggattaccgcaccagcccgacgaaggagcaagggacaaccgttaagtttacccctgacttctctattttcggtgtggacggtatcgacgaagagacaaaggaagtcatcaaagatcgccttatggcgcttgcagtggctttccctgccgttaaattcacatataacggtgatatcctcccgaacaaattcgcgatgtatggcgcgatgtacggtgataaaacgattacccagacaaacaacaaaatcagtttcatcctggcgagcacagaagacggtttcaaacagaaatccttcgttaacggattggatacgaaaaacggcggtgttcatgttgacaccatgatcgacggtatctattccgaactcgaaccgatgatcaagaaaacacacgctatcgagatcccgaaagcccgtgtaaaagaatgcttgactttggttgtgtttttgcataacttcaatgcaccagcttttgatagtcagacgaaagaaaaactgactaacaccgctggggagttcaacaaccacgccggactgaactacaaaaagatcgcgaaacagattatggatacttctgaaataatcactccgatcattgagtccgctctgattcgcaaacaggcagcagaagccgcagccattaccaaagcgaagaagaaagcgaaaaaggcgaaggttgcaaaacatgttccggcatcagggatcgacactgacggggtagaaaccactttgtttctgaccgagggcgattccgctgtagggcagtttatcgagtgcagaaacgaagagacacaaggcgcatttccgctacgtggcaaaccgttgaacacctggggaatgagtaacttagaagtgctcaaaaacaaagaattgtctgaactcatggcgatcctgaatctccatccaggcgactcttccgaaatgacttacgacaacatcgggatcatggtcgatgcggacgttgacgggggcgatattctcaccctactgattgcgttctttagtcgctggcctgagttgttcgagaagaaaaagatccgttatatccgcacaccgattatcattgcgaaagtcggtaaagatgaaaaatggttctactcccttgaagatttcgcaccgttccgcgataaagcgaaagaggtacgatatatcaaagggctgggttctttacgcaaagaagattacgatcgggtgttgggcgaccagttaaaatacgatacaatcgtactgggcgacgaatacaaagacgttctggaactgtgtttcggtgatgaatccgatccgcgtaaagactgggtgaacggaaaacataaattttcggtgaaatgatggaaagaagtattaaagacgttgtacaggtagaagggcttacgtttgccctttacacaatttattctcgtgcgatcccgcacctggtagacgggttcaaacccgttcaccgtttcttcgtgcattccgcagcgaaaggcggtacaggcttccagaaagtagcctctatcgctggcggtgttgcaatgtatggttatcaccacggggaaacatccgttgaagaggcattgtctcttatggcggcgcactggtgcaataacatcccgctttttgaccgcgatgggttctttggttcccgtctggttaaaaagccaggcgcaccgcgttacattaaatgtaagctgtctccgctgttcaaggctatctacatggatgaagatttgacaatcccgcatgaagatcctgaacacgtaccgccagcctattacctgccaatcattccgatggtactggttaacgggttcagcgggatcgcgaaagcatacgctaccaacattccaccacacgatccgatttcggttctgaatggatgtgttagttacctgaacgggaaagatttcacactggatctgaaatacccgcatttcaaaggtgacattgaaaacggtacgatgtatggcaagtatgaactccagggtaaaactaaactggtgatcacagagattccggtcaagtatgatcgcgtgaaatatatttctattctggataagctggaagagaaagggtatatcgtaagctataaggatctatcgaaagaagatttccgctacgagatcaccctcaaacgcgagtatgcaaacgggcttacccctgagaagatcctgaaagatttcggattgattgagaactcaaacccaaacatcaacgttatctttaacgggaaactgcattcatacgagcgtcctgaaacgttgctgaaagacttcgttgatatccgtattggtgtttaccaacagcgtattgataaacgcatccaggagactaaggaagcgttagataaagcgctggcgaaggttgacttcatcgaccagatgatcgcacagcctgacgcattgaaggggcttagtcgcagcgaagcggttaaacttgtctctacgtggacgggttgcgagaaccacgccgaaatcctggttgcgatgaacatctatcatctaaccacggatgaacgtcaaaagctggaagacgaagcgaacgaactgcgtaagcaactgaaatactgggaagaaacgaccccgaaaactgaatatctcaatgatttgaaagaactttcgaagaaattgaaataatttacaaaaagcctcttgcattgcgggaggcttttttgttatagtgtcctcactgattggggaggatataaaatgttcaaaactcgtagcgatatggaaataaccatctgggccaaaagcatcatggcgaagcatggcttatctcattggtctttcaaaatcaacggacgtttcaagcgtactctgggacaatgcaattacagtcgcaagtcaattgaattgagccgttctcacgttaaggaagatatctacgagaacgttttagatactctcatgcacgaaattgcacatgctctgaccgaaggggctggacacgggatcgtatggcagcgtaaagctatcgagttgggcgcacagcctacaccatgcaaaagccgtatccgtgagaaatcagtaattcaggaaagcgaaaaagacatatacgcgtttttcctgaaaactccgaacggtgaagtttatcagtgcaatatgaccgaaaagatgtacaatgagatccaggaaggtaaacgcaacattgcaaacatctacatttcaagaaacaaacgagcaaccaaagggcgcttagtagcgcgtaaattgacaccagaacaatatgcagaggcgattcaatgaaaccatatgatgcaccaaaaacgggaaaatatattacaatagctgtgctgtgtactattgcaatatgttttgtaactgctatcgtggtcggtatcatggatatgaaagaccgcgaacgtcagaagcaacaggtttacgaataccttgaccggatgtgtacacctgttgagtatgggcttgatcaaaagcctatgaaatattcatgtgataacatcatcttcaacaccaagtgagatataaacaatgaaattgcgtcagttagcaccacaaaccattcacactacgggcttcgataaaggcgaacgcacgaagtttaaaatggctaccagtgcgaaaacatacaaaatcatgtcatcaaccatctacaaatacaagatccgcgcaatcattcgcgaaatctccagtaacgccattgatggtcatatggtagcgggtaacatgaacccgttcgatgttcagttaccaactgttctcgatccgcgtttcatcgtccgtgattacggcacagggttaagtgactggatggttaaagaggtgtttgcaacctatttcgaatccaccaaaaccgacaccgacgaactgatcggggcgctgggactgggtagtaaatccccgttctgctacaccgaaacattcactatcgaatccatccaggacggcgttaaacgtgcgtacacggcttatatggataatggtgaacctttcgttgaccaaatctacgaaaccgaaacagacgaacctaacggcgttcaaatcaccgttccggttaaagtcgaagatatcgcagaatgggaacgtgaagcggcgcgtgtttatgaaccgtttacgggtatccgtccgcgctttatcggtgttcaggttgatgtaaactggcaaccgaaagaagcagacgatcgcgggatcatccgttataagtccatcaactattcaggcgtatacgcgcgtatgggtaacatttgttatccaatcgatctggatatgttcgaaaactcgctgttctactgctaccgtaacagcaattacgcatatattctggatttccctctgggatcgctggacttcatgccgtcgcgtgaagagttgagccttgataaagtcacgaagaaagtgattacggatcgactggataaaatcaacaaacgctttgatgaagagttgatggaacagtataaaaagcagaagacaacccgcgataaactcgtatggttcaataatctgcctagcttgttacagacattcgtaacccgtgataaccgtttccgtgtgggtaaagaatcgctggctgaaattctgacgcgtatcaaaagccctgatacagcaaccggaaaatatgtgtggggcttctgggctaacccatatgacgggaaagattgcgtattcgaacgtgtgggttctggtcgccgttatgagaagtataaagcggaaaccaccaaacgccaggacgttatgcgcatgatccaaccgtggcgacagaagaaactgttcatcgttgaaaatgataacgaagcgcgttcactccgcccgtatctgatcggttactgcatgatgaacggttcggatcgtatcagtttcgtaactgccgatcgtaaaagtgactctgtgcgtcagttgattgaaactggctatttcgatgaatctgagatcgttacactgaaaaccagtgaattgaccaaagaattcgaaacgtacaccgaagatcgcaagcgctggaaagcaacgcgtgaatcatcttctggtgattctgaaccacgtccgaaaacgcctacggcatatcattacttccttgatgatcagggtaacttacagaaaaacgatctgttcctgacaaaagcacagttcgtgaaactggatgaaatgtacgctatgcgcctctacgggattgatgaatatagccgactggacggagaagcaccgaactatacactgggtagcatcgccagcagtatgatgaccctgttgaaagttaccggactgaaaggcgtgatggttctgcgaaactccctgtggagccgcattcctgatagcaacatgaaatgtcttgatgactatctggtacagcgttttgccgacgcggtgaaaaagatgaagcctgactggtatccagcctggatttcgtctaaacatggtagcgaggttcgaacccttcgcgattatctggaggtgactcttgatcgcatggtgaaaaaccgctataatccagaattgtatttgttgcttgattatcttgatggtaagtttacctacgatactatcgagaacaaaaacaaatcgaaaaatgtggtgcgcaatccgttacttcgtgaaatgtcggtgaagcattacaaaatgctgaaagatatgaaagaacgtgttgataccgcctttgatttgtttgaagaacgcaaccctgcattggtgtatgtgttgcgcaattcgtcttactctttaggccgtaccatgattacggacgataagatcaagacgaacctgattaaccttatacggtggaaataatgagaaacgttaagatccttgatgatgtacaaaagaaagctgtctatgagggctttctgaccagcgcgaacaaaaccgcactggctaaacaatttggtgtaagcgtccgaaccatcgggcgcgttattaccgaacaacattctaagtataatacggaagcatcgaaaccacttccacaaacagatgtcaaatctaaaatgattggttctgaatcgttcattactctggtactggacggcaagatcatcacagcggattcgtcacaccctaacttcgaaaaagcacatgctttaatggttaagggcgacatcgagggagttgctaccctgttggacacaacgcaagcgttgaagatttacagcaaaggcaacattaaaatcatcgggcataaagtcctgtacaaagatatcgtgtttgacagcggtatcacacaacgtatcgttcgcgaaatgtacaacgatcgcccttacgagcacctggtgaacttcttcgagaagttgatggaaaacccttcacgcgatgctgtgtatcagctttacgggttcatggtgcataacgatatcgaactggcagatgatggagatttctacgcgtggaaacgtgttcgtgaagacttccgcgatctggcttccggtaagttcgataattcccctggtgttgtggttgaaatgccacgtaaccaggtagacgagaataaaaaccgaacctgttcatgcggtttgcatgttgccgcaaaatcgtacctgcctcactatggcggaggacgcgggaaagttattcaggtcaaggttaatcctcgcgatgttgtagcaatcccgacagattacgacaacgctaagatgcgtgtatgccgttatcaggtgatgcgtgatgtaactgtgggattcagtcactactaaccccaaaacagcgcctggagcgattcaggcgcggaggattcgattatgaaattcctacagagcattcctgactactggcagaacttgagcggggcagaaacagccattaaaaccgccaaagaactctggaacggaggcaacgttaccgctggacgtacagaagacggagaacagacatacttcaaaaaaccttacggtattatcgcaacagcccttgcatttaatctgggttatgttatgctggtactcgcaacggttcagaagtgggtagagataccgatgaaatggatcgggacgttgttgattcgcttagttcgcttagtgttcggcgcaacgatcttgattttgtcatgccctatcttcttgctggtactgacaatgaatatgaaaactggtgtaaacaccaaattaggaaataaactggtgaagaaaaatgaaaagaattctgacaaggcttgacatccacaaatatgctgttaagataggtgacatgaagcgcggtgacttcaccaagttcgaaggggttgacctgaaagaacacggcttctacctggtagttgatgataaaacgggtaaggtagtatttcgattctacgtagccccaaatcaacgccgtaagactggcgcaaaccgtactctgttacgcatcaaacgccgcgaacatgaaccatcagcgatggtggccttgctggatagtgcttctctgtacttcgttgcacacgataagattaaaaacctctttggtttctcgaatcttactggtacaatagcggaaagcgcgattcagatgcggttcggggatggtgagaactatactgaatacaaccgcgcactaaatgatctgtttgactttgaattccaaccatactaattgagataatgaatatgaaactgttttccaaaatccgttctgtagacgaaatcgtagcaacttttgacaaaaccctgaccgaactcgaagcgcgtattgcgcatgatcagaagcaggtcgaacaggtagcagcagaccgcaaagcagcggaagaagaacatcagcgtaagctggctgaactggctaccaaagaaagcgatcacaccgcaagcgcaacccgcgccggacgtatcgcggataagatccgcaaactgctggattaattcgaggggcgaaagccccttaaatatttctttttgaggggctttaaatgaacaatctggtagcaaaacatgatttcaaccgcgcttctactcaccgcgatcgcaagcgagcacttaaagaagcaaaacgtaagcagaaacataaaggtaagtgtgatgaaaaccgctttgattattcttgaggaaatcccagaaaacacggggctgtatctcgttgaagccgacgaagatatcattgaaatcctcaaaaccgctcacgggcattatgtgaacggatgcaacaacaccccagaacaggatcacgctgtcaatatcgttaacctcatgttagggccgcgtacagacgacaacctgaaatgggcgagcgaatccaacgttcctcatgagtatgtcgggatgtattatcagtgcaacgttgacgataaagcgccactgataccggaaaaacagattgatttagtagttcgaacaggtttcttcttatgagttcacaaattctgttcagcaaagaagatccattaggcacagattcatcggtgcaacgcttattctggcacatggattatacaaaaaatcgttgtcgtaacccaaacaatacatggggaagcaacgaagacattgataaagcaaaaatttatcctcgcggaaaagcatactggaaaatttttgatatccatcttcataaagttatgaaagattcgaacgcatgataaaaaagcccttgacttcggttgagggcttttgctatattggccttgtcgaaacgaaaccactaaggagattcaccatgactaacctgactaaagttaccgcgacatacttcatttcttctggcgctaaaaacgctatgtacactctgcgtgtagagcgtcgtggaggtggattcacttctgataactatatctgcaacctgtctactgacccagataaagcggaagcgaaagcgcgtgaatacttcgatcgcatggtggatcgtctgaaccagaccgatactttccagatggtgttccagggcttcgcagatttcgatctgttcgaacgtcgcggcaaactgtctgtacaagataccgaaaatctggaactgctggaacaaggcatcatgccgatcggtaagcgtaaaggtgaagtgattgctgatatgccgatgtatacgattctgtggtgggctgatcagtgcaaagaaaacggcaacgatagcccagtatttcaggctatttgctcttactgcatgggcgtagcgctggagaaggattacatcgctaaacgtgaagagatccgcgcagaatgggaagcagagcgccaggcgaagatcgcagcagcgcagcacatcggggaaatcggtaagcgtatggaaatgagcggggttgttgagaaagtgatttctctcggatatacccaagtttcttattacaccgaagtggaacgtttcatgaccaaaatcaacgtagatggtaacgtggttatctactacggaaacaaaattgttgaagagggtgatgtgattcgcttcaaagcgacacctaaacttcacaacgaatacaaagaagttaaacaaacaatcgttcagcgagtaaaggtattataatgacatacgaagaaatgcttaatgaagtgtgcgcgggtaaaaccgcgtaccgcccgattaacccagatatgatcgtgttccgcgaaggggatacgatcattcgccgttctcaccgtaaggttgagattaaccaggtattcattgccagtgttgaagaacagaaagcgaccgactgggatatagttgcagaagatgataaccacgacgaacttgacctgatcttagtcatagataatcacccactgggtgttcgtccatacatctatcacaatcaatacagaggcgaagtgattctatcatgacacacgacgaagccatgaaagccgctacacgcggttttaaagtcgcccctgtgggtaaggctgggttctttgtatatcacagcgtagaggctggtttccggcgcattacgataggtaatgttggatactggaacgatgaatatgttccgacaccttacgaactcatgcgcgtatgggacatatacgataaaagcccgatgacgaaagtaaaagatttcatcaatcgggctttgagtagtttgaaactgaaattatcatcgaatcctgcctaaaattctagcggcctgattgcacacgatcattaacttcgtatcggcgacttcgggcttctgtatataccattccattagaattgatcctgaatagtagttttcgagattgaagtaaggacaactaaaggtatatgctaccggaacaaggtcttttgttggaagatacgggctggcaatatctgagatatagtacagcccgtttatatgtctattatactcttccgatgtcttgtctataggatagccacccagatttttcgggttaatctgttgcggtaacttcccttcatacgcaattatatcaacaaaataattgacattcttaggtctgaacccaaagattgccgaaaaatccgcacccgtagttaaatgcactatgtttaactgttcgatggatgcggattcaaacttttttgccttttcaatctccatcgtcggcacgtctataacgcttgaagatgttttccagactgaaaataagtcatcccacttataccatgttacgaacataatgaaaatagtgacgataagaaccaatttaatgaataactgtttccatgttttgaccgccatgatgaacgatattacccgttcaagcaccgccaatttatcttgtaatagcgccatatttaatcctcaagttcggggatgccgaccccgaacatatttaggaatttacttaacgttgagtgaccagaccggatcgtgtttggcctacacgggcgttcaaatagtcataccacgcgttatgttgggcagaagcaatctgatattggcgatatccatcctgtatacgaccgttattgtcaaagtcaaacacaccgccgtcatccatcgtaagtcttaggttaacagcaggaccgttttgaatggtaattacgctaatctcattgctgaattgtgcagaaacacaagtaccgaatgcgttgccgttaaaactaccaccaactgcgccgtgaccggaaggtttcgaatatggtgaataccaaccaaccccccactgaccacgataacgggcgttgttatagtaacgctcatacaccgtaaagttgatgttatatacggattgtcccgccattcgagacatataaaacggtgttccgattcgaaccgcgttacccgcagcagacatccaccgttgccctgtttcagtgaccgcagacgaaccgatccagccaggaactcctacaatagccataaaatacctcatgaaagaggggcaattaagcccctaatttgttttcgattgcttccagacgttcacgcagttcgttgattgcgttaaccagaagcgcgttaattcccgaaggtgaaatggttaacataccagtgtcgatgtcttcgcgcactgcttccggcaataccttctcaacatcctgagcgatcagaccggattcgcgatggtatacgatatcatcagcatcttttgattgcttatcgtagatataacctttaagctgttcaatcttgcttaatgaatctttcagttcaactaaattcgatttcagtcgaatatcggaacgaatatacacatcgttggcgtttacgttaccttcaacatacagaccacggttcatatacagatccgaagcacgcaactgtaaggtcgtattcagtcggtagttgtgtaccgatacgttatcatcagcaccaccaaacccgaagtatgcgccgttgttacctgccaaagtaatcagcaaataacatgattggttagtcgctgtgttattcagaagtaatgctggtccgttaacaccctgaacctgtaactgtttatagttagcagttgcgccagtagtccatcgcataatacgctggctatttgcataggcgttgagaataccgtcaccttcctgtttgaaacctgtatcgttatcacccagagaaataccagtcgtacccaatccgtttgcagtaccacaacccagaccgtttgtttcgaccgtgccgttgaagtttaccgcgttaccaaagttaacagaaccgttgatgtttgcaccgtttgctatagaaacaacgccattcgagttactgatagtaaacggacgtagaccactccatgttccatactgatcgccggatgcagtaagtaagaaatatgtacttccaccatcatttcgaatgatgaaaccatagtttcctcctacggcgcggaattgtccgccagtaccataagtattactctgtatctcttgacggaatcgagcataacccgcagtagaaattgctaattcttcctgtccgtcagttgaacctgttgccagtcgatatacgccaccctgaacagtttcatgccagatcgtatccgcattaccgcctcggaactggcgcaaatagtttttcccgccctgtccaacagtaggtaagaaatattgcgctggtgtgccctgtggaacttcgttataatacgatggtacgtttacgttaagacctgatttggtgttaatatacgttgcgccagtaccacggaaataatggttatatcttccgttaccatctttatagcctaagtgggtaacaccatcaccaaccccgtttccatccccgtttgtagttactcgaagtattgctgtgtttattccttgagtagcataatcagtttcaacggaagcacggttattgaatacacccagaccattaaacgtagcctgtccaggaacggttagatggttagcgagaactaaagttccatcagaagcaaaacgagttgcatacgcaccaccaccagtacgaacataaacgttcttccctgtatcaacgtagaccaaacccagttcattacctccagcatcctggaaatataagtttctgtttccatcgcctttgatagacatttgcgtaccaaagatcgtaccgcttacaacagtttgcatcccgatgttgaattgcgtccctgttaaactaacaagaccattatcacccagcatttgcaattcagcgcgaatggtcccagcagcaccagttgtcgtgtttggtgcgccaaaagcacggatataataagcaccaccacccgcagggcgttgggtacaaatcagatcaacaaggtttgcccccaagtttggatctgacgttggtgacgcggtttttgaatgtataacaaatgtgcgtgtttctgcgctaggaaacccgtttgttactgggttattgtctgtgcgagttgcaacgagataaggttctgttgccctaaccattgcgatcctgtatggtaatttcaattcagttgcagaaccttgtaattccaaagttccttgcattgtatcaccagctttcttcacctgtgcatcgtttgttacgttgcctaatccgatttctgcctttgttggcttatcgttttcggtgtagactttaaagcctttatatgtgattgtgtttccagaagggagtaaaggcaaattagcctgactccagatagtattaccgccaacggtagtacccgcttttaaatctgccattattaagatcctcaaatgcttttatgatatttataaaaagaaaaagccccgaagggcttttaattagcgggatttgagttccctgacttcctcgcggagttctttaatcgcgttgacaagcaaggcaataacagcagaagacgaaacagttaagatctcgttctgttcaccatcaacgcctttcttaacagcttccggtaatacttcttgcagttgttgtgcgactaaaccagcctcacgggtagtttcttcacccccgatatgatttgctttgtcgtacaccataccatcaagtaaatcaactttatccaatgcattttcaatcttactgaaattacttttcagtctttcatcagaacgaatatacacatcgttaaagctaccattaccgttcattatcatttgaatgccggatgaagggttgcgttcaaaataaaccagatatgacgatgaatccgacagttctatacggtttccgcgagtagcatcaccagcatggaagatatacatatcgcgagggtttgcaccactgcgaataaattcaacgcgtccgttgccgctaccgtttaatgttaaatttccattgtcaatataactgcttgactggctgatacgtccgttgactgataacgtatgtcccatcgagacattaccagtatcattatttatatacaaaggacgtaggttattataacttccccatgcatcacctgagtttgttaacatgaaataggtgttaccaccgtcatttcggataaagaatccacggttattgtatgcaatacgcaatccgttggctgagttggaaataatatcaccataagatacaaactcaccagagttatcaaaataccattgacgatctaccgatccagtacggtaatggactgtaaacctgttggtgtttaccaacgtacccatagaccacgcaccgccagcctgagaataatattgcttaataataggccagtattcagatgtcgatgtagtgttaatattctggaaaatcggagcttttgcagtgctttgagaagcccaagaacctctaccttcccccgatgcatcaaaataaccgcctgtttggttgatggttcctgttaccgtgcctcctgtatttttcaagaacagtgcatcgatccatcctgaaaacccgcttttgttgatatacacgttcccgtcattagccagaataccaccgccgggtgttttaagtggttgagatatgtttgccagtgttagaacaccagtcatcgcatcaccggatttattgactgcccctacttccgccggagtcggaggaagcgaagtatcataaattcttctccatccattagcatcacccgcactataagaccatgcaccaggagaacccgtcgcagcacgaatccatgttgatgttatatcatagtaagtctgaaccagagaaacaccactattcagagtacggcgatatgtggcaacctgaccgtaatatgttgtgtttccatatggaccgtccgttacgttaccaccgaccgacagaacatcgttcttttcagtaaccgcagcagccccgaaactgtttccagacataccgcgaggaatacccgtgatataacgttcatcatggttagcccagtttgacggagttactgtattcgcagtaatcgcgccactaactgccattgatgtagcattcgttaagccgaggttagaagtcccgattacacggaaagatccttgctcaactgttacctgttgggtttgtgaatccagactcaacagcgtattttgagtaccatttttaaaggcacggatgtatattttattacctccgtctgtgcgagcgttcacgttaattgcacccgctaactgtccgccagaaataccgttgtatgcgttaatgtccatcaacccagattccgcaccaggaaccgaagtaatatcagggcgacggaaaacaaccaccggagcagcagcacttcgagtgatcccgaccgactggttagattgaatagtgtttgcggtcaacagaacgcctactgtcacgttttgactaaacgtagtattcttcgcaacagtaccgccgttaatcgtcgatagtgcgtttatatcctccgctgttggacgatcgttttcggtgtatactctccagcctttatacgttaattgtccaccagagggcaatagaggaaggttagaagcactccagatacccgcaccacccagcgttgtacctaatttcaaatcagccataaaaatttctcctgtaatgactgtatttatgaaaaaggggctttcgcccctttaacgcacaattgacagattaacgtctttagcggacatcgaacctgtgcttgtgttgtttggataacgatataaaccgaaatcaaacataacagcaccagcaggaataaccccttcgtttttgtagaatgaatatacgttcgggatcgtgccaacatcacgcatgttaattccagagatatacgtattgtttgcatcccagaactgcattacgatgtacgcgcccttactatttgcgattgctgttgcatcacgtttcatttggcattgcatacggatcgtatcaccaggttttattccataactgcttagtgatgctttcgttaccgccgcttgctgggtagcagtccattctttgaactggtactccgctgtattggtagaagtatattcagtcggatcagaaacaatataatcaagttcagcaaagttatgcgaactaattttcttgtcactgataaccccaacaggcgaaacaggcagagaaagcaattgttcaatcgggtttacggttccagcatcagtgacttcggaaagtgtttgcatcctaataccgttgacaccgatagccgccccgtttctgttcacctcttcgcgagggactttacagaattggatatttcggcatcgggcctgacctgtggtaactgttgacggataatgataagcagaaacacccaaacgagttatatcagcattatctggaatagtgtaatatcccgataccgaatgccatgtatccgcagcaagtccagttgttctaagaactgttgatgatatccactgtccagacgcaatatgagtaaaggcatacagataacattctgcccccgcattacgtgcagcctgatcgatatagatgtccgcagtgattttgaaaatatcattacgagaaacatcactcccaacgttccaaaccccgtatgctttgaatggataaccattaccgctatacgtttgaggatcatccagcattctttcaggaataccagttaccccgatatcactaaattcatcaaacacaacttcaacaaaactcgttgtattgtctttcaaccccgtaccagaaccaccgacaaagttttccatgcaaatctttttcatcgttgatgaatagatagctgaataggatgaacggtgagaatagttggttgtggtgatcgggatattaaagaaccgagtttcgggccacgcaacagaaccaattttcctcattgtcgctaaaaagttatcatcacttctgatcgcatcgaaagtataaaaacacacaattctgttcgctggaagtgaattcaggtagtctttaatcgcattcccgttcgtagcaggatcaccatacatatcaaatgatttgtaatccaataatgctaaagttgttccatcaatgactgccaggttaattccgcgagcaacttgtgtccgcctgttaataatatcagccccgttaatagatacctcaaccgagttgaccgcagaatcgttattcgttccacggacaacaaggcgatatttcacggcgtttgcttctgaaaacacattcgccgtgaaactatcagggccgaataacgccataaattcgttattcgccatttaaattattcctcccacacaaattcacaagtcttagttgctgggtttgcgaagattttcacgttaccgattttgatatagttacgtacaaccagagtatcgacggttgaacccgctaccgctaccgccccgatttctgccggagtcggtttacgacccgcatgatagatcaggtttccgttgatcatcgctttgttgtaatcggtgatattgatgttgaactcagtcaataccttatcgtcaatgccagttaagcgcattttctggacgttcccagagaaatcacctgcctgaacatgtgccgtaccgctcacactggtaaagcgtccacccgtaccgtttacgctaactgacagcgcaccagtcatagtatcacccgctacgttgacataggtactgtcaagatgctgggtaaagtttcgggtgttgatcacggttgcagtggttgtgccgccgtcattactgattgttacaccgttccaaccattagttgcagcggttcgtaattgtaccgtaggcgttgctgtacttgcaacaaacaaatcacccgccgtgttgatgttagccagggctttaccattcagacgaatgttcgtaccggaatacgccattgtgccgttaccgacatcacctactgtcagaacgtcaaccagatccgttgtacccgtcgccaggcgatacgtgcttgcctgaacagtttcatgccagatcgtatccgccacaccaccacggaaggtacgaagcaagtttttggttcccgcagcctcaccactcagaacagtatttgcataaacagtgtttgctttcgcagactgattaatgttattgttcgtggttacggtgttgttaaccgttaccgcagcgttagccgtcagtgttccgttagtggttacgttaccaacgaagttgcttgtaccgttaaacgtgttatttccagttaccgtctggtttgcatcacgacgcatccagcttgcagcaaccacaccgcccagactcaaactattctgtgccgttgccattttcggtaagaagttttgcagagcaaagttcagaccgcgaggcgatacagcatagaaatcttcgagataatcgtcaacggcctgagtagaaccaaccagattatcaccgatgaaagtgtttgattgggtagtgataaacaccgcaccgcgtcgagttgtcgtcgcaccccacgccggatcagtaccgttcaagaactgcatggtagccggagtaattgctaggttagtagcagtacccgcacccgcttccgcgttagtcgcacaacgaataataccttcggcggtatccgtcgctttcttcgcttgcagtttcttaggcgtaatgaacacggtatccagaagacccgcatcagtttcaccctgagtcgcaacacgtaaagtaccgcgctgtgtttcagtagcagacgcaatccccaggttaatcgttgtccagatagtgccggactgagttaaaccgtcatcggtagcaaccgcaacatgacttgtaacgtcgaagaactctttcagcttaaccggaacaaccgccttattcgttaccgtacctgctgcaacttccgcagtggtagcgagggcaataataccatcaagtgattcagtcgctttacgatcgttcagcttcttaggcgttacagcacggagatcatcagttcccgtgtttgtttctgtctgggttgcgatctcaatcaatccgatacgcgtttcagtagacgttttacgatgcagcatttcaggagttactacgatcggcattgaagcagatcccgcagcagcaccagttaccacttcgttttcagtcgccagaacaaccagaccttttgacttttcggtcgccgtcttctcgttcaatgatttcggggtgatcagatcaacaccgttattgaagttgtagacgttcgtaccagcatccccacgtaaagccccctccgctgtcgtagcgcccgttgtaacgagtttcccgatacctgctagggtttcggtcgcgcggcgtgtgtcgagctttttaggcgtgattgcggtagtgtcatcagtaccagcgtttgtttctgcctgagttgcgatttccagcaccccacgacgatcttctgttgctgatcgttcgttcagctttttaggcgtcacgatcacgtcatcaaggaaggttgctgtcgtgttctggttaacttccgcagttgttgccaggcgagcgataccacgacgcgtttcagtagcggttttattcgccagtgtacgcggggttactgccagttcatcagacggcgtatcttcatggttcttgtttacttctgcctgtgtagccagcgcaatcacacccagacgagaacgatttgttggatcgacacgttcaatgatcgggcgatactgtgcaactacccattctttcgttgctttcagatatgacagttccatatatggaagatagtcagtatcggcgttgaaagtcagagtgtcaacactgaaccagtcatcaggcggataatccttacgctgtgggaactgcatcatgtttttgttggtgcggatcttttcaccggaaccatctttaactttgatcgtacagttctgcgttttccccatcatgtacatactgatatacacgcgatcaccttcggcaacatcttgcggaagagtcagcgttacattacgtacagttggtgggttgccagcaatcggagtgatgaacacgtaatcgttcggcaacatgttcaggtcatcactgatacgacgcagacgaacgcgctgatcaccgtcataaacaacccaacggttattagcctgatcgaacataaagataccataaccggaacgctgtgaagtcacagaggttacgttattgatgccgtcatagctgatcgtgtgtccgctaccaggataaacttgcagagtcgcaacgttcaccgaagcaaggcgatccagatcgtaagttgtgattgagtcaccatcgtttgcgtagcgaggcaactgcaacgtaattttacccgttccactgttacggaatgttaccatacccgcttgcatttggaaagcggttaaaccagtcgcattaacaaactgcgaatcacggttatcacgcatttcagcaacacgccataagttgccgttaaaaataaacgcaacggtcatatatgggtgagtcagtcgataagagcttgactgaatatcacgtaaacggatctgacgggtgtttgaacgcactaacaggttgttaacccctgcaagaccaccaccatctttaatagtgataatatcaccctcaacaggggcatctggcagaatataggtcagttcagagaaacgaccgtcagccattaagtacgtaccggattcaacagggagaccgtcattgctcgttacgttgttatatacccattttggatcgttacgggttgagatccattttgtttcatcgaaagcacccgctggtgatggaatatctgcgcgagcgtaccaaatacgacgcgcgtacatgatagccataaacgcagcataaccacgggtagaatcgtattgttggatcgtgttaaattcgttaaaaaagtcaacgttcacgccgtcgctcaacacagagcgtgatgctttaccaacgttgataactttttcgccagcagcatcaaggccacttgtggcgcggaatgatttagctaccattatcgttttcctttatcttattcaatactgatatttataaacaaaaaaggcgaccatcaagtcgcctttttctcacggtaattgttcagccaatctttaacaatcgcgtgatgaagaggattcgcataatctaatttgtttcttttcttatatggcgtaaaagcgtttttctctttgtccgtcatttggaaaagggtttgaaatgatttgcgttgccttttcgtttgaactgcttctgtggtttcgataatggcatcgggaaaatatttttccttcatgtatttcgctaaccgcatatcaggcacaaataaattaatctttcttttgctgttgttgtgtcggatatcagaacgagcgcataactgaaaggctggttcgtaatatttactgacaacataagcatcaactaattcttcctcttcaagtccagaggacaccgcaaccgctcggagcatttgacgcagccagggtaacgggttgtaactgaataatgctaccacgttagtatagctcgaatagaagttcaacccgtgcgagttgtacgggatttcctgcccctcgctaaacttcgatctgtatgtgttggtgcaatagatgaactgttcgccccctaaaagcgcctccacgcgttttttaatctgggtgtatactgtcgtcccagattgagagagatcgcccgtataacgcgaataatccccctctgcgagcacatgtattttaatgcgcttcgtgtttttatattgcttaaagtcaaccagcgtttgaagcggtgaatctttgaactcaacatcatgaaacgtttgtaggatcttccctgtaatcgtatctttgatgttggatgaagcaatagttacatttttgaacttccactggcttacgtcatgatcctctacgaagtaacagacatatcccgaatcgctacattgcatcttcaccggaatagcccctaacagagcacggtaaagcgggaacatcttcattgcgatatcatcacgtttacgaagcccatcataggctaatcgtgtaaccagttctcgtttttcttcgtcaagttttaaatcaacgatatcatcggcattgcaactaaacggcaagcaaatctcgcgtatgtgcttgatattgctattaaatcgcagactttcgaacgcaaccaaatcaggaacttcgtcaatgtatagagaaaaatccttatacaaatcaaagtcatcaatgtttttgagtgctgcatgagtgataaagatcacatcataatctttgacaacctcacgcagcgcatcgttattggttcttttggttcggtgatccgtgtccacaatcaccgctcgtttcccttttacctggttgatgtagtagtcataagactgttttgataacatcatggaaatcgaagcgatgattgctttttcgcccgtttgattaatatggttcagaatcgcctttgttttaccgcttgacggaacacattcaatcgtattaaagatcatttattcttagcgtatttcttctggtatttctttattgcttcgtcggtgatctgtttaggcatttgacgtgctttcttcggtttcagtggttcgacaccgaagatttcaacgccgtaatgtttcagcatcattgcaacgatttcctgacgaatgaagttgcggctaaccttttcagggaattgatctttaatctgcttatgaagacgatcttcgagcgcgtccaggtgagtaggagtgatgatcgcggtgttatcgcgttcaacgaatttctccatgtattccattgtttcagcatgaacagcatttgcagcagggagtaaaatttcacggctcatttaatcaccaataagttgtttcagttgcagataaccgccgataagtttgttatcgacaaaaatacgcgggtattgaaacgctaaactacgttgccttacccgttttgctaactcttcgatacgtgggcgatcgtattcaaagcccagatcgtttttcgcttctttcagaacgggataaaatgtatattctatccctttttctgtcaacagcttttgtgcttgtatacacccgtaacagttatgaagactttcgggaattccgtagatttcgactttcattcttctttccgtatggtttgagatcctgcaaaatacgctttttctctttgcctaacagtttttcgatattctcaacagcggttaactgagtgtgcagatcgaacaggtttgcaatctggtcttcctgcattttcagttcagattccatgttgatttgatagatgctaccaccactgaaaacatgttgcaaggcgaaacgcagcatcgcatcagatttacgtactggcatcggtgcgatgctcaacgtttccaggttagccccgaatgatggatcgatgcggagatcacgcagaggattttcctgtacagagcgatacgtgaatttagggatatccatcaggcacagatccgaaccagtgacaccagcggaaacctcttccggtgtagcgatacgcataacgttttcagcctctacacctttacccagattaacttcttctggttcttctggggtgaattcaccatcttccggcgttacttccttgaaccatttccatagtgatgcagggagttcatattcgtagccaccgtccatgataaatgcgcggtcttcaaactcaccgatcgaggtgcgatcaatcgtcacgtaacctttttcacggatgatgtttgcgatacctgttttccaggttttctctgcaaagatttcaggggatacggttaaaccgtaagtttttccagcgaataattccatgattacctcaaataaaaaaggggatgccgtaagcacccccgaattatattacttacttgccagcaatgcaagttttgcggcggcttcacgaactgcgcgagctttctgcgcaacaacttcgatcgctttctggtgttctgccagtgcgtcttctactgccagtgcagcttcgatgatctctttattgcgttgctgtgcagcaacatcaacggcctgaactgctggagcgtttgccggagctttaccagtaccgagttcacggaagaacttacgctcacgatgcatgatatacgggagagtacgatcttgtgtgatagatgcatcaccgtcgccgtcaacagactcaagcaccataataccgttgttatttttgatgtgttgcacaatgcgtttgttcgcggtatgagagcgcaggaaaccagcttcatctaccagaacatacggacgaccagcaacgaaatgtgtaggcatagcttcaaccgttgctggttgtggtgcagcaggttttgcaactggttcagttaccggagcgaggttaacaccaccatccagttcagaatccagatccggtttcgctggtgcaggtgcaacagacggtttgcctactggttttggctttttagcgcgttttggcgctggggctttagccggagcaacttctgtgaagtatttcgcttcccatgcacgaagggtgttcatagcgacacctgctggagcattgaaggtgtagcgatcaccgttacggcttgtgatgtttacaacaccgttcagcaattggtggatctgttttgattgaacactgttcgcaatgtttttgccgttgtcagtgaaaccttcgacatcaaccagcttgtaatctttaccagtttcgaagcgggtttctttggttctcaccgtccacggatgtgaaccgcttcctttggtgatgtttttcagtgggatcgaccacttccagcaatagtcacgggcttctttacgggttttgaaattcagaatcatgatattatctctcaattgggttaaatttatgctacgtggatatcttaacagaactaccaaccaggtcaagcgatatttttaatttcgatggaattctttttgaactcaatcattcgctgattatccgaaccgcgaaacggtttcttagtcggtagatccttttcgtaccgtccatcgatcagaacatcaatgaatggtaacagcttagagcgttctgtatcgccctgtaaggcttcgagggtgtaacccgtccaaacccacacatctttatcagggaacgtcgcacggacgcgctggagcagttttaagagcgtcggatgattggtgcggtaaaacggatcgccgcctgtaagcgtcaacccgtccacatggggatttgaaaggagtttaatcaactcgttttcagtctcttcggtgtatggtgtaccgttgcggggattccatgttgatttgttgtagcaaccttcgcatttatgattgcagccagtcacgaacaacactacacggattcctttaccgttaaccacatccatgttatagatgcggtcaaagttcatcagcctttcgcctctgggaacagacgggctttgatcgcttcgtcgataatttgcgggaattcattattcacgcgcttaacgatttcctgacgaaccgttacttcgaggtttttggttacgcgagcaataaacgcttcttcgtccgctttgaggtttccggttgcatcgttgattgcttccagcttgattgaatccagcaggtcggcgcactgttttttaacgtttgtcgtgatcagttctttgatctggcggataccgcctgaattgatatcgaaaacattgctgtatgcgtaacgtttctgaatgtaatcagcaaactctttatgcacaatcttttcgatttcgtgattggctggcatcatcaaattgacgtgcttgatcaccatgttttcgatttcttcggttacgcgcttaccgataacgctgtcaacaacgttcttgatgacagcggcttgcagatccattcgcgcttgtgttccttctgggaacaggttgttcagcgcctgtgtgtctaatttcagttgaatcattttatagtgcctttcttctcaaggatcagttctttgatccgttccacgattacggcgtattcccagttggctaacttctgggtatcacaccactgttgaaaatccttcattgcttttacgtgaccttctttccagtaagtcaccgcgatttcgttacaaagattttcagtagcagtatttttgattttcatgatttagcccctatagtttgttgtctacaggggcatattataacatcattcgtcgtccgtcaactcttttttgaatccgacataataagcatcagatccattccatgtggaggcgttaacgctacccaacagaacacgacaaggcatattgttatgcgcagactctacaacctgggatactgaatccagcggattgctaccggatacccagcggagaagatgacgatcatcactgttaatcggatcgacgaattcaaaacgaataccgctttcaatcagttcatgtagaagaaagttaatcgctttgcactgcgttttgttaatcagcataaatcacctaccagatctttatcaattttggtgtatgtgagcgccggatcatacttctccagcacgttctttttgcacgaatggatgaacttttccatcgcacgggctttcatcaacactttgaaatcttcgccaaagcattgtttgattgtgggaattgcacgagccgctttgtcacaatcaatgatcagtttgtactcgccttgtgtcgtgacaaccaccattgagatcagaacacaaccatcaaatcctttttcattgattttatggaagttcagcttatccgtagtgcttgccaggttcgcataacgatccccgcgaatgttacccggagaactataccgcgaaacgttgattgaaggaatacgaatatcttcaacgatatcacatgacgcaacagcttcaacgaaatcaagaattctggtcgctttgatgacgtgcgccttaaacgaaccgacttctaactcatattcatctttccagcctgaatagtagtcaaccgcagggctaatcgctttcatgagcgcttcgggaatgtcaatgtgccatagctgttctgcgtactgtttgcgccagtctggataagttttacgtgctggtttgaatgcactgttgccgtcttcgaacatcatttcacttttcctctctttttcgtaaatgtcgtacacacttcttcgttcgtaagcgtcttttaggttgctgtttactatactatcatgcgtcagttcttcgcaatactttttatcccattcagaacacgcatgttcaaccatttcctgaaaaacgcgctgtggaacattcccatctacaagaatcctcaataagcgatcagtatcatcattcggtaaagtatgaaagtttttaggaagtttaacatagaagtttctcgcacgagaaatcaaccattcttcaccgcgatcacgttcaatagtgtaatcgtacatagcaaaaaaggggctttcgccccttcctcttatttcgcgttcagggagtcgatgtaagcgctaacgtcagcggaggttacggaagcggcatttttgccacccagcaacacatcaatcttcgtcacgatggtatcgacgcttacggaagtgtggcctacagcggcgatcacgtcttccggtacagtcagacccagactttcggtttgcttgttcagttcgatgatctccaggttgattttgacatcagccagtttgcgatccagttcgacgacagagagatcaatctctttgttcatcccttccagttcttcgatcttcgtctgtaagccctgccagatgttacggtgttgcagcgccagcacgtaatgactgttggacacttcctgccccgccgccagcagttttttgatctctgattctttaccagtgtgaaggtttttgtgttcggtaactttctttttcagcttcgcgatttcctgaacagcagaaacgcgagtatgttgcagacggtcgatctctttgatcaggatacgtgcagcactgcgccatgcttcttctggggaagtgttttgttcgattgcagtttcaactttaccagtcacgaacgatacgagtttcttgaacataattttgccttatttgatttcgaattgattggtgaaccattcaggggctttaacaactttcccctctctgatataaccgattttacatagttcgttggttaagtcaagtctttttccacccgccatgtaaaattttaatctgcttactgggatcaccggacggataacgtcgcgatagccgaaatgcgcactacgtaccactatagagagcatacgcaagcggttgatgcaaccagtatacgaacgcccagtagcgcgggagaagtcctccagcgtaacgccaggggcaatagcacctatcagatcaagataatccttttcaacccagaaccgcccgacagaacatttcgatacaccctcagccatttttgcgtttgggtgtttctcgtcttcgcgcttcttcttgtcctcaaggaacttattgaaccgaatttcttcgagtctgttttctctttctacccgtgcgcgtacacgggagggaaacagagtatcaaggattttcccgatcatatcgttggctttccgtttggtagtttcagatcgaaaggaacattcacaggccggacggtttctaattggagatattgttccatccccacacgcttaccacctactttgttataacggatgttctttccgtcatagcctacagcctgtgaaatgtagtagtgtttagtttcgcgtaaacactccatccattcttgtgttccggttttgttgcgtacccgcgcctttaatggaaacatcattcaccccgtagaactttcagttcaccagacaaacgctgtagattggcggttgcagtatcgtaacgtttttcggtctgtttcagggtagtttcccgcgccttacgcaagaatttttccagatcacctggtttcgtcaccagcttaccatctacgtaaattcgtcccagcaggtgagaacaatccagcagttgttgtgcgtcggctttttcaacagcaggtttaatcgcgacaaactttttaaagaatccgcgatcctcgttatcaaacagatacgaatcttcggaataccatgttgtgccattggcatcaacgatcccactaacacctttccggttgcagtgcgttaccttgataggaaacacgacagatgatagttgattaggcgacagaggactaccacgcaaagctaaattgcggtacaccgtcccaaaactttcttcgtcacgaaattcaaaataatcttttgtccagtacatcatttttcaatacctcatagtttcggtatgtgcaatataacaaaagcccctcactttcgcaaggggctttttgattaattttgatgcttagttcggtgcatcatttctttgttcttaccgtcgttgaacccacggacagcaggagcacccaaataaccgcatgtacggcgagtgacgctcattttagccggatcgtgattaccgcagtgcttacagtggaaaccttcttctgtaggcgtgaactcgtcatcagagccacatacaaagcacttatcgaccggaaggttagttccgaagtagtccagtttttccatcgcataatcccagactttttccagggcttgcaggttgtttttcatatcagggaattcaacgtaactgatatgacccgcagtagcgatataatgataatcggcttcatagtcaattttctcgaacggtgttaccttgcggtcaacgtccaggtggaaactgtttgtgtaccagcctttatccgtgacacctttgacgcttccgaacttctcaaagtccagcttacagaagcgatggcagagagattccgctggggttgaatacaggctgaaaccatatcctgttttcttcttccatgcttcggttgccgcgcgaaggtactcaatgatcaatctgccgatattctgggagccgatacgatcgaatgggtgttggcctgagccaaacatcaacagcgtttcatgcagtccgatataacccagactgatagagctacgcccatttttgaacagttccagaatttcatcatccggtttcagtcgaacaccaaaagcaccttctgtgtacaggatcggcgcaacactggctttaacaccgcgtaggctttcgatacgagtcatcagggcttcaaaacacagttccagacgttcatcaaggatgcgccagaatgcgtcgtgcgcgtcttcttcttcctgtgcttctgcttcaatagcgatgcgtgggaggttgattgtcaccacacccaggttattacgtccatcaagaatttcattaccgttatcatcatgccacacgctaaggaaactgcgacaacccataggagatacaggaacgctagaaccagtaataacacggttattagctgaactaatgatatctgggtacatgcgtttagaagcgcattccagtgccagttgtttgatgtcatagttgcgatcctctggatcaaggttaattcctttttccatgaacataaccagtttcgggaataccggagtaataccctctttacccaggccgcgaatacggtttttcagaatcgctttctggatcattcgttcacattgggattgaccagtaccgaacgtaattgtaacaaacggggtttgaccgttcgcagtatgcagggtgtttacttcgtattcatatgactgaaacgcgtcgaaaacatccttttcggttttatctattgcatactgaacatcacgagggatttgatactttttggcatctttaaagtgtttatcatatgtcatttgaacatatggagccagcactttatccacgttcgcaaaggttgtcccgccgtactggtgagaggcaatctgtgcggtgatctgcgccataagagcggtagcaacaccgatcgatttaggcggttcaatatccgcgttacccatcttgaaacctttctccagcatacctttcaggtcaaccagacagcagttagtgtaaggggtgaacgggctatagtccagatcgtgatagtggatatcgccggaatcatgtgcttctacgatgtgtttcggaaggatatgattacgggcgaaatgcttcgctacgataccagccagcaaatcgcgctgtgtcgggaatacccttgcgtctttgttcgcgttctcgttggtgatctctttgttggtcagattcaccatgccggagatatctttgaacagcttgcttttctgttcacgggcaatatcgcgttcgtggcgatattcgatgtatgcacgggcgaccgctgggttcgttttcatcagggattcttcaacgagttcctggatacgggcgatcttcattgcgctaccatcacggatctgattgtactgaaccagcatgattgcggcatcagcatcagtcatagtcccgccagctttttctacagcaatacggattttttctttatcgaaatcgacgtttttaccgtcgcgtttttctactttcatttcgttgccttcattaattgctttctatattttgcggttaaggctttgcgttcgtctttgtcggcgtactcgaagcccatagaaaccatttcggcaatcatatcaggtttggtaagtcttgaaaaccattttaccttatctggtatgaatttgtcatgaatacggttttcggaatagtcttgtttcagatatgcaagcaagttctctaaccactggatgtaatcgacatcacgggacaccagaccggatctgctgaatttgtgcttcacaataccttctgtaccgttgcataggttacacagtaggccgcgcacacgtccggcgttttcgccgtctaaagcatggtcatggtcaaggtgatgtttctcgatctcgccctccaggggacgtttacagatagcacaacagcccccttgtttttcaaagagagcttgcttgatagttgggtagtcttttttggtaattcgtttcgtcagcataataacaccattcagtaaggtgtcattatttattacagggtgcggacgtactcacgaagttggtcgaacccgcctacgtgtttcccgtcatggaaaatctgaggcatggtcatccggcgcgtaccaacaagcgcttcgagttcatcgatcaccgcttcgttcagtacaggtttaccgtcttccacggaatccgcaacagacacgaactcatacggatgttttttcgcgtccagcaagcgctttgagttcaggcacggagcgcagttatacacagaagggatatagccataaattttaaacatgttaacctacattaaatcgttcagtgttaaagggaatgtatttacgtcgcgtttctggtagttgcacacgtagacttcttgcgttttgttttgctcgtaagagtcggtatgctggcctaacagatactttttatccagattatgaacgcggtatttctgcatccattcaatcaggatatcattttgttttccggcatggtgagtcacgttggacagtccgaacatgattccttcgctgtgcagttcatccaggaaagcatataactcacgttcgcgatcttcgttccagaacttgttatacactgcatcggtgatcaggtacggcggatcacagtacacgaaatcattttcacagatatcaatgtcacggaatgaaccactggaaaactcaatgcctttcacattctttttgaaatgttcaaagcgttttactgttgcatcgttgagcgtccggcatccgaaattagcgttgaagtcgcctttgtcgtttgtccggttaacgttgctgaatgaatgcaggatcaggacatagagccataacggatctttgttctggttgtattcatcacggaatttcaaatactcttctttcttgtctttccccaacccctttgatgcaatcaattctcgcaccggagacaggtcaggaagcgttttaagacgctcatacatatcaataagcgtcttatcgtaatcgttgcttagaacgggtttagggacgtttaacgacacactaaggccaccgcaaaaacaatcaatgaaacgcatgtatgaacttctttcggggaacagcttgaagagttcaggcaatagcgattgcttgttacctgtatacgggataacacccaaataactcatagaaaagattccagattgttaacgtatggctgaacacgaagaatagaatcgtgataataattctccatcagttcgaagcctttgaaccgtctgttggttagtatcgacattttcataactgtaccagaaccagagaaaatatcaagaaccaagtccccttcaaccgtccacgttttaatgtgatcttctgccagttgttcaggaaatattgctgggtgtttgaatgcaatctcgtccttcgttgagtgattgcgccctacagcgtaataccagatattacccttaattttatccttaccaacaggtttacgtttcttaccggaacgggctgaacggttcttttcgttggtttcggaaaagtagctgttttgtcgtgcggtttccttttcagggaacttacacggaatgcggatcgggttgaatgtttttggtgcgccttttgtccacacgaacatgtattcaaagtcctgttcgtatcggttatggttcttcggtagagcggttttgtgatagatcatcgtatcatgcaaccgaaaaccttgttcgatcgcgtacaaggcttgacggaaagatgtacccgtttcactaccgttgatagtcgcgtcacccacaacccacacaaccacaccaccaggcgcggtaacgcggtacagttccgatatcaactctttccatacgtgttcaccccagacatcaccagagccgttataatggcgcaagttgtcatacggaggcgaagttatggtcaagtcaacagaaccagattcaagctgtttaatcagctttacggagtcgcctaaatggaggtcaaccccttctttgattgtggtaatcataattcaccaagtcctttctcaaataaggcgatcgtttcgtacttatacccacgattcaccacgaagcaataattttcacctaatttctcaagcattgcaatagcacggtgttcatcttttttatctttcaacagataagcaattcgaacaacctcttttagtgtcgcgttgtccacctgttccaacttgaacccgtagcccaccaacttacaaaaaagccccttgcgagcgacaaggggctgattgttgtagaagactaccgatccgttatcgttggcgcggatattaaatccttgctcgctcacggataacccctactgtatcggaggtgtttaatacaccgttgtcgtaatacgtaatcatcgcatcacgccacccgtcaggaatctcagtttccagagtatcgattgttttgaattccacaccgttagtgatggtcatcagcaaacctttcttactctgtttccattcggaacctttcgggcatttgtaaacgcctttccacacaccattcacgcggatagcgcacagtttttcagcatacttttgagtgtcgcgggtaacttcttgcagcaaaccgccgcccataccgaacgcgatgttctcactcgcccacttgttcgcttccatccaacttaacacacggttgattgtttcaggtccgtggatctcgtcgccctggatgattcgaactgaattatgcagaactttgtaacctttgctgtttacggtgtaaccgaagatttcgcccagtttacgcagggtgtacatgatgttatcaatcatatcaccggaatcaggacgaacaaccagagtaccacccgcagcaatgatttgctctttatattcagcgatgcgatctacagcgcctttgtagtcccaggaatcgtacacacaagcgtagaaccctgtaccgaacatttcgatgctgtttttgtatgcttcgtcttcgttctctttaccgtaggaaatcgtagtcgaatgttcgcgagccggaattgaaacaccgattgcttcgacgttttcaacttcatcaaacagagtttgatagtccgcaaacagactgattgccataatcataccttcaacggtatcagtcccgatgaagttatagaggtgtgccagcccaccaatacccgcagattcagcagaggtcgcgccacgcgccccgaaatcatgcagacgtgtacccagtgtgatgttatatgcttcaccagtcaggtcagaagtcatatcaaggtaatgagccagaacctttttacactcacgcgatagcgttgctacagatgacggataccagataccgcgaatcgtcattgtctccagccacccagccaaccatgagaattcatgttcggcgtacacagtcgcaacggcatttttaaccggaacaaccgtaccttctgggatcgcacggaaagtaacagggacataacccagttctgcgatcttcttccacccttcgtagttgaaaatctctttcccaaagtgcttacggtaaagtacccgtgccaactcaacttgtttcatggtaattggttcagcaagaacccgcgcaacgaagttaacgccagcggttactacttcatcaaacttaccaccgcgagattcaatatagaacatcgctgcatcagtgccttgtggatactgcaaccagtgggacactttgtaggaatcagttgaggtgatcaggctattcagttcattaaaagttttcatttaaacgtactccacgttttgatttaaaagatacgatccaaacgttctggatggatcgtgttccagtatttactcttacagtctttcctggattttttaccattagagcagaacaccttatgatatgtcgtcttcttgtgcaactctttgcacgtaggacaggtgatcatggttcctactttagcggcttttgcaacatcgtacaattgtttgatgtccttctgccgctcggacgtaatgacacgcccgtttacttctttgacaaccgtttcagttcgaatcgaaccatcggaatatttaacaggagttttgacttgcttcggcgcatttgcttgttgcaaaagccttagagtttctcgacgtaaattatgaccacaaaaatcatcatcgtcatcgtcgtagccaccccagctatcaatatattctgcttcactcatgctcgatccttagttgctggtcagtaagaagacccggttgtcgctatagtcgatgtagcaatcccaccaacccgcacagttaacaccatctttttcaaggcttatgattttaacgctggttgcaacgtcatcatattcataaaccgcacccagttcgttcagcattgcttcaacgttagcccgtaagcctttaccgttgtgtgctacaccattcagtgccaagcagtagccagcgcaagtaggtactaatttgatttccatgatgttttccttttgggttagtgtcttgtctacgggagctatattaccacactcataactcccgtcaacaagtttttcgaattattttcaccaggtgatgtaataagtcagatcgctatatccgtcacgcttaggatcgctaaaattggtctggatacgacgcgaacccgcgaaggtattgagtaacgcagcttgtcggttgcgctgtgtatcgaaagtaaacccttcttccgccagccattcacccagatccgcatatgctttttcggtacattcctgatccataaccttaccgataaaacgtttcatatcaaaggtatatgattgtttagtcggatatttcaggacatactcggaaatgtctttgcgggatgcttcgaccattttcgcgttgatttcgtcaaccagtttacgcgcacgttctgccagtgtcgggctacgtccacagcggggatcatcttgcgtttcgcgtttgacccactgtgtcccgcttcccgcctgtgcgttcacaccgattccattgatttctaccattatgtttcgccttttttaatgcctcttcaactgagaggcgttcgtaattacgtgattgttcgggagttatcaccagagaaaatccagagtaggaggtttagtgttaatccctaaagtatcgcagacttcatccagaactttttgattccaaagattgaacgttggaaccttatacaatctggcaagccttgcagcgatcgcagtaccacctttaacgcaaaaatctttctctaccgcccagaatagaacaaaatctgtaggtttgtccaggttttcggttaatacctgcattgaattgcgagcgtatcggcgttgtgtccattcgctttggttgtcgaagtgtccagctacctttctcgcttcgtcagcggatttgtacgtgtcgtattctgtatagtcgatgatatccttaccattcgaatacaacccgttaaaaccgttctcagggaggattatacgccgtctttctggtgagtagtcaaacatgaaatggctatccattccaggagcaccaccagagtaagcgaagatcccccgatcacttaaagcacgtccaatctttatggctatactcgcgatacgttcagggggttcacggctaccgatcagggtagccgtttttgcgttttcgagaacagttttaaaattcattgttcaggattgcgccccagttctcacgaaccagatttgacgcttcgttagtgaaggttttcttcgccagcgttggattttcgaactgttccaggaaaggtccgtagttacgttcgatttcttccagcgcatcctgtaccgtcagccccatcacgcgaccgaaatctttcgcggtgagattcgcgctgtcaatttttgacagaacatttttcacacggttttcagtcaggtagcaggtgaattcgttcagcttcactttgtctgtttctgacagttcagaaggagcattgaagcggttcgcttgcttgttcttcttctctgtgaacttcgtcgttttgtatttgattgcaacgcgttcaccgttcggcatgaaagcgggttgaacaggcttcatcacaaaaccttctgcgatgttctcaccttcaccatctttcagcgtcatgaagtttttgaactcaggttcaacgccgttctttgcagggatcgcgccggagttcgccaggttaaccaccgaatcaaaggtgataggcagtgtgcggatctcgtcaaacgtaccgtatgccagcagtggagccattttcaagccaacagcaacagcgtaattcgcaacaacgttatcagggaggaactgaccattgacgcggatatcgaatacatagaaatctttttctccgtagtcaacatctttctgtacaccacgccccgcgaattcgccgtatacctggatcaccagttcatcgctatactcaccgcttaactgacgcgcagtagagatcatttcccacatcttacgaacaggttcggagtatttcgcaactacgggttcgcaaccgtagaactgttcagcagggagaatttcaccgctacgttttgccggaatgactttgataccgtccgaagtgatcaggctaaagttagccccgtggatcttttcacgcgctacccacacgccaccagtcaaaccattcatgatcacaccgttaatgaatttaccttcataatggttagtcagagaagaatatttcacaaacataattaacccttgattttcagttgtttttcaatttgatacgcggctttgcgtaacagtttcagttttacttctggaaggatcacagaacccttcataaacgcatcgagatttgatttctcgctattcgcggcgctggttactgcgatcgtgttttcaaccgtgtatcccagagaagcgttgattcgttccattgttcgggagtcagagcaaccgcctttgttgctaaacggtctgccggagtaagaacatacgggttcactcattagcttcgcccagtcgcttaacgtcagagcaaattgaaggttgcggttacgcgcatcatcgtttttactgttgtatgaacgagcgacacgcagatcgaattcaatttgctttgcacggcggcggtgttctaactcagcaggatcgagtgataccatagtttgaactttttccggttctactggctttggttttgcttcaaccttcaccaaatcctttttgatagtcgaagttatcacgcccgaccagcgattcatcattgaagacatataaaccccttacaccaaacccgcttcctggaacgccagcgccatagcgccgttgattgctttacgtttgttatctggacgcggatcgcgtttagctttggtcttaggtctacgctgttcttcacgatgtttgttgatatacacacgacgcagaacatgtttcacttttggattttctgcgcggaaagcacgaattcgctcaatttcctgaacaatcacgtaaatgtcgccgttatcgagcatgtgctcacgggcgatctgtgcatagcccagtttcagatcattgaatttgaaatgaatctgtactttttcctgctggctaacttcgctgatattacgctgaacgattttcatagttactttcctttagtagaatcaattttacgaataaactctaacacttcggcatttctgctgtcaacatttttaagaacaaaagttacaactacatgaacaccggatgcttcgttccaaccatcagcacacgggatcatcagatcatccagagtgttgacaaggttttccatatccgcagggtgatcgacaaacaaagtttgcgtttcggtgatactggctttgaatcgtttcccgatctgtgcttcgagttcgtccagcataccagcagataacgcggcgatgtcgatgtttttcatcccaccatacacaacatgaaatagtttcatatgcaactaacctcattttcatatttttcgcgttcgaaacagtcgggttcgttccagatctggtcaaactcacgtttcgtcatgatatagccacgggcgattttgcgagttagatctgaaccgatcggagcataccacaaaatcaatttacacaccattccctgaaccagacaatcatacagccctttttccagggtgcgtacatctgttacgctatcgactaaatcgggggcacttcgttcaggatggtctttccactgactttcgatgatgtcgtttagttcacgatggaaatagatccacgattggaacgatgcatcaggcggatttgacttgcaaccagcaggataaaattcaagcattttgatcagcctcattcgcaatacagatcgccataaaggtaaacataacccccaacgcaaccatccagatcgcggttaaatctccatacaaagaagaataaccacccatcacttcaacgcgatatcccagcaagaaaacgagatacgctaacaccttatctttcataattcctcacagaaagcccatgcagcatgataaacgcttgcgcctttgtcatcgttcatgcataccacatctaccggacacacaacccgatacagtaccggatcaccacctattgaacgtgcagcccttccagcatagatacgagccagcccgatatcagcagtaaagaaaacacgatccagatttttctttctgcctttttcagacagagtatcagaatcacaaggaggcaacaacatgctttcgattccggcagcagtacatgatccgtgatagaactcaacgaactctttgcggcagtgaatggtattcatggttatctccttgttttcagagattacagcttatcgctattcgccagacaagtcaacaaattctttttcaacgtcttctttcgttctgaacaggtaatcagtaaggctacctgtcatcaattcgcgagctttagcaactgaacgaatacggcgttcacgttggctttcaatatcaccaattccgtgacctggttcccacccttccaaatccaacatgacgcgcgggtgcatcatcacacgaatatcgtttccatatgaatagctgttatattgcccgaatacaaatcttttgaatttttcgtggtgaacatcatcaacttcgacctgttctccgtagtaaacaatttcatcacagaacgcagcaagaacaagcccaccagagttttgaattttcaggattgcatggatcatgcggtgacgtgcttctgcaattatatcatgagagccaaatccaatctcttttgtcccgaagcgacagaaaatagaataggtgatgttcagcaggtatttcgcgacgatttgccattcattatagataggattgggattgacacggtatgctgatttatattcgcgacgcagttgaagaagtgtttctatgactttagcaacactccacccgttcggataagtcgaatcgttgcgtttagcaacagcaattgttgaatttgcgtataagtggttgaaagacattacgcggacgttatcgacgtaaccacgatcgcgagcactccatttgaagtaatcccattttggatcacaatctggacgcatagacggggtatgccagcgcttgaaccccaagagattacagaaatcgtcaatcagggtatcgcgacgggatttatattttgactggtcgccaagagcagcggcgttgatgaattcatgcagttcatttttcataattgttaccttatggttaaagttcttccggcttatccgtcgaacaattgcactataaacgcactcataaaccgtgtcaataaatacttttaaataaacacctggagttctaagatgaaatcattcaaagactttacgagccttgatgaagcgctgatcaccttcggcggtaaggcttatcctaaatttggtcaggtagttatcctggctggcggtgcgggttctggtaaagggttcaccctcgaaaagctgttaggcatcgaagggatcaccctggacgttgacgcactcaaaaaattggtcatgggtagtaccaaactggcagcagagatcaaagcgaaaactggtcacgatgtcaaaacaatgaacctgaaaaacccggacaacgtagcaacactgcatcatgtgatcgcagacgtgttcaacgtatccaacaaaaaccaggcgcgtgtgtacgctggtatcacagcagcaccggaagaccgtaaaccaaacctgatctttgacgtaaccctgaaaagcatgagcaagctggcaagtatcgcccgtgatgttgaagcgctgggttatcagaaagaaaacatccatatcgtttgggttatgaacgatgttcatattgctatgcagcagaaccttaaacgcgatcgtgtagtgcctaaagaaatcctcatggatacccacgaaggggcagcgctcactatggcgaagatcctgaatatgggcgactctctgaaacagtacatggacggcgatatctggatcagcttcaacaaagtaggcatcgacagcgaaatcaagaaatctgacaaaggcggtatgtttgttgttaagtctaactacatcaaagttaaggcaaaaggcaagccgcaaaaatccattgaccagcttgataaagagttagtggctaaagttgcagcatacgcaccgaaaactgatacatggggttgacaataggaacatatatgaatatgatgcacacacaaaccgaggaattgatatgaaaaagtttttgttcgatatggatggtgtactgttcaactgggaaggttcttttgttccgatgtacggagacccggcgagaatgccggaagaagaattgaaaaaagcgaaacaggctatatcacaaactgacttctacgaaaatctggaaccattacaagagggcatcgacttgttctgtcatttgagaactttaggtcaggttgcgatcttaaccagcgtagggaaatacaattccgatgcggtagcagaacaaaaaagaaaagcgttgatgaaggtgttcggttatctgcctgaattccactacaccaaaagcagcggagagaaagcagcatatgcggacaaaggtatactgattgatgacagggcaaaagctgtgttgccattcagaaaagccggaggtaaagcgattctcttcgttggtagcaaagaagaagcattgaaagaaatcagaaaaattgcataaaagaaagggaaccattgcggttcccttttttgtttatggtgtgtaatccgcaaaggagcggttcacatcctgaatagtgatgttcatatcgtcgttcaggaaaacactacgatatttccctgcgctatcccatgcttgacgatgcttatcattgcgggagatcagagggcaacggtaagcgtgggctttcagttcgttcagatcccgacaagtccagaagtctaaacgtacaatacccatctgtgcgcatactttatccatgtacgcgattttttgactattcacccaggacgggctttttgcttcgttgacgagaataaaaccgacttcgcgatcgcgataggtcatgccccatttcatcatatcccaacccaacacctcgatcgccagtttttcatagaaatctgtacgaaccagggacgatacagcagcttcatattctgcatctgtcatgttttgtgggcgtttgccaaatttggcttcgattgcgtcgctgaattttgcgaatacatcattgaattcaaatagtagcatttttaccttcttagttgttattatggtgcaggtttaacgtttaccgtcagagttgcagtaacagatccagaggttgctgttacgacaacatcaccttcactaaccgcatgaagtttaccaccaacgatagaaccatgaccagaagagtcaacactcagagtcatttctgtaccagaaggatcgatggtaaacagatcagttgcagccagatccgcatcacctactttgaaatcagcaggagcggtttttggtgtaattgttacgacaggatcagcaggagtaaaatcactcagcttatacagataaccgttacgggattcgatgaaatcaacatcggtgtaatcaatatacgcctgtttcagtgtgtcgaattctttcgcgtatttttcttcggcataatcacgccagtcttcgcttgcagcattcgcagccacgatgatatcaaagatccaccacggcagataggtaaagctggtgttacgccacgggatcgggtgtaccgtagtccatttttctgtagccattttcaaaacctcttagtttttctctatttagagaagtaaaattttgccgtcacaagacggacatttatcatattggttcacgcgcccatagccgttgcattcaggacagaacgggtttgttacaccgaacacattacggatcgcgtaagtggattgttcttctgtcagccctacgaacccatcggtattgatgaaatgttcactctgttccggcagcatatcggtatcgtcatcaaggataaggtaattcttacatccgaaggtgtcgatccatgctttgatttcatcaccgcgtccagcttgtcggtctgttagattcgtacaggttttcccaataatgcgatacaatccccacgggtagaagatttcccgtagagtatgggttgtgttgccgatcctccatgtagaggaaatgacaatatcacagttcgcatggtttacgatccggcgcaggtgtcgagcacattcaatgtccatatgctcaccaaatttcatgcaccgcatattatttagaacgccgtcgatatcaaggaagatgacgtttccgatctctttaccttctgataagtctttcaggcattcgtgatttaattcagtcatattttacctacaaaaaagggggcgtagccccctttgaattttaatagaaaccgcgagcttcgttatccaggcgacggtctgcaatcatgtgcgcttccatttggcgagaaacataatcaggatcgcattccatttttgcttcttcgtagttgtcccaggtatcagcaacccattttgaaccgttccaacgagcataaccaggttcagcagggacaggataatcagcttcgtaagcgtggcgcagtgcttcttcaacagtatagtaaggagcgtttgaattgactactttcttcactttaccatcagtccaaacaaacagaactgggtaataagcgtttttcatcatttcgtttttcattttgctttccttcttcactgcgagagccattcccccgccttcgagtacaaatatactttaaacgagggtatgagtcaacaagttttttagcaaaaagtgctaaaacttaaatgtttcgaatcggctatttctggtttcgcgaacacgaacttcaccatcgcgcacgatatagaacgcaagtgatttgattgtgtcgattgcgcttgcatgtggacagctatcaggatctttgtaccagtctggggtttgtttaatccagtcatagatccaccacggacaggtataatacccgttagaactcgcagagcgccccatcatgaagattgtcgggctaaacccttccaaccataccagttcgcctttggactcgtcagaagcgcttacaggagcttctacgacatcaggtactaattggatttgatcggctacttccggcgcgacctctttaacgtactccataaaatccgcagaagcatcaataaccacatcgggaacgttcggggcttcgatgacaggttcacccatagtcacctcacctttatatgcaacgatttccggttcaggggaatcgatcagcagttccggtttttcttcatcttccggtaaagcagcaaccagatccgccagcatgttatcgaaggatttttgtttgttcagcttaacagcaaacacagtcattgcgtaatcagctaacgcgcctttctgttcttttgcgtcgagggtacggaacccatcaactttttcgtaatcaatgttcattggtatctccaagtgtttatccaatatttatgacataaatacgtatatactttgtacatagggtaatcatagtggatattgaagtcaaatttttaaacacaagccacgtacagattcaggcagaaccaaacattgtctatgaactgcgtgactatttcagcttccagcccccaggctatcagtatcaggccaaatacaaatatggtggatggaacggttacatttacttgatggactacaacgggaaactcccgtatgggttagcctatctggtatccaaattcgcagaatcacgcgggtattcaatctgggttgatccaaagatccacgaaaccgaggatatcacgcaagaagattttaacaagtgggttagcgaacatccggtttatgacggcgacaaacagatcgatccgtactggtatcaacgcgaatccgtgttccacggtatcaagaaccgtcgcggtgttctgaacctgccaacatcagcaggtaaatctctgattcaggggcttatctctcgttggtgtctggaacattacagcgggaaagtgttgatcatcgttccgactaccgcacttgttgaccaaatgatcgaggacatcgcaaactatcgtttgttcccgaaatcggcaatgctgggtatccgttcaggtacagcgaaaaacagtaatgcactgatttacgtttccacctggcaatcagcggttaaaatgcctgccgaatggttccaacagttcatgtgcttgatggttgatgaatgccacctctcaacaggcatgagcatcaaaaagattatcgacacgatggatcaatgtatcttcaaactgggtttatccggttccctgaaagaagggaaaacgaacatgatgcaatacatcggtgcgttcggcaaagtctttaaaccagttgatacgcgtcgtttgatggatgatggacaagtcaccaacctgaaaattaacacgatcttccttcgatacaaagaagaagaggtcaaaaaattgaagggtgcggactaccagacggaaatcaagtacgtaaccaaccacacacggcgcaacgcgtggattctaaaattagcgctcaaattagcccgtgagaagaacgaaaacgcctttgtgatgttccggtacaaagagcacggaaaatggctgtacgagcagttgagcaaggtttacgataacgtggtgttggtcaatggtgatacagacattgacgatcgtaacgaaatgaagaaaatcgcggaatcgacgaaaggtttaatcgtcatcggttcgatcggggtactgagtacgggtatctcaatcaagaacctacaccacatcatttttgcgcacccttgcaaatctgctgttgtggtgaaacagtctatcggtcgtgtacttcgcaagcacggatcgaaagcgctcgctactgtatgggatatcgttgataacctggctacgctgtcaaagtctaagacagccaaaaataaatacagtgcgacaaactacggtatgaaacatgctatggaacgtgtgcggatctacaatgaagaacgattcgactacgcgatcaaacaggtagaaatttaagaggccaaaatgaaaagttttactacattcgtaaacgaagcagcgattgatgatttcatgaataaggttgcttcgtgccggacactagaaggtttgaaagaacttgaaaagtattacaacacccgcgtgaaagaagtcgaggttgcagcatccgatgacatttcaatgcgtgacgcgatcaagggacggcgagaagaactgaaagccgaacttgaaaccggagaagaagagaagttttaaaaagaaagccccaaccgaaaggaaggggctttttaatttcggaaaccgtttgttccgacacgtacatttattttatttcagtgctgtactattctgaattacaattaactggcctttactcgaaggtatcttaccaatcaccccaccgaaagtaaattctatcggacggcgcaaatgggtacgccacacggtaagcccaagccccacaaggggtacacatctatttactgctataaatctgggcgttcgtcttcgatacaaccgctttcaaacgaaattcgaagtgcatgaaccctggtcacacattcttccatcaatcccagcaaacgaaatacttcgttaaagtcgatttttgaatagtctttcatattcacacctacagcaacatttgaacttcgttcagatcgtcggcttcattgataccgcgatcattcctttcgttgagatattgcaaacatacgacaccgcagatcgggccagcttcattgacaaacgccgtattacgggagttcatcggttgtttgcacacaacgcatttgcaatcaaattcttctgccattttatgcaccactctcaagtttacggatctccaacatgtttttgatggagtagcctttgttcttaacgatatccagcgcttttccggtaaactctgcaatcagttcgaagtattggatcagcttgttaacttcaacggtcttaggatcaccggagatagcaattttgatttcacccgaaccagtgtaaatgacatcggtcatttcgctttcgtgtctaccagtgtagaacagtaaccgatcttttacaatcgcttctttcttcgcctggagttgaataagttttttcttagcattcgaatggtatcgaagccattttgaccaaatcttcggaatgtctgctgattcgctttgtaacttcaacggatcaatacgcatatcctcttcaagttcagcctgtagatcttcaagttttagttcagccatgtatcacctcaaaacaaagtaacattataaccagttagatcaagaagtcaaatctacgagcgaagcgagtacatgaacgaacgtagtgagtgaatgttggttaaaaagtatacggaaatgtactgttttctctatatataaaatataaatattataaacagtacatcgtacttacccatcactcacttcgttcgtgaaaactcgcttcgctcgtttgaccttatagatctttattactataatggtcttctcaaaacaaaacttgttaacccagtttaggtaacttaatacctacgatctgactcagcttagatttacctgcaagagcagaccaatcatcacctttgatcaggtgatcggattcgctttctgctgtgtatgggttcacggaaagaccgtaacgcatcagaatagcaactttcggttgcagggatgccggatctacggatactttgattgaacctgcttcatcagcttcggtatacggagcgaagaacagagagcctacgtgatccatatcacccagatcatatttgcaaccagtcagcatataatcgaacgggctgttggtgtctgtatagacataataaccgttgttcagcttacctgttgccagtgggtgttgttcgtcggtttcgtgcatccaaccagacgcagccagaatgcctacaacacgcgctgttgcgaggacgtaggtagcatcaaatgaagtcgttctattcatttcctgccccatttcacacgctaattgatacaggatacgacccaatgctggagcatccttcgcggtgtatgcggtagtaccgtcaaaaataccatccgtaacgagtccatcgacgttgtaacgtttggaaacggtgatcagtgtttgaataatgtctttgttgacttcttcacttgccacggttcccaggatgtcttcgatcaccccatcagcttcgaactggttcgcttccaaatcctgcatcagttcaaccgtcatttcggttttaaacttacgcgagcgtaccggaatattccagcgatccatctggaaggaggttgacgcgatatcttcgctggtttcatacttagaagtgtcagcggcttcactcaccagacgaattttgctttggaacacagctttcatgatcgcggtgtctttgtcagtatccagagtgttcagggtaatcggtgcgataacctcataaacaacgtcagtgccgtcatgcttgaacaaatcacctttaacgtaggctttagtcagatcgatttcgtcgatgtctgtacgtccagagattcggcctgaataggttgcagcactggagaaagtcatatcaccattagggttgcgatagcgaacaccgaacagtgttgcaacagggagttctgtttcttgtacagcaaccagttcatgatagatcaggttgttaaccgcgcgagtcaaagaaaccagttctgggcgcgtgttctgtacgttgatgtcggtcgtgcctgttgcttcgttgataactttttctcgtttaccagacggaagcgaagactgacgcatcaacttgtgaattgtgtagtgtttatcactcatttctttggttcctgaattagagggctttttacctgtatctatttacaccaacaaaaaaggcaacccgtaggttgccttttagtgtaaagtcgattacagacctttaacccagaccttacggaagtatgcgtttttaccgcacatttctttgctgatcataccagaggtgatacgatctgccggagcctgagagcgagagttcgcaaacgggttgatgccgataccgtaacgagttttgaagcccattactggctggaagttcttaggatcagaaccacgcagcggagtcagcgcaacgtatggagcgtagtagataccagcatccatttcgttatcacccttgtagcccacggtgaagtaatcctggcgagcgtactggtcgatgtacactttgtaagtgccacccagtacaccagcgaataccgctttagtggtgtctacgttcagagttttctggagaccctgacctgccggagtgatgccgctgtcgatacgagccagagcggaaaccacgttacgggaagcgatgatgaagttaccagcaccacgaccagtttgacgcgcgatttcgttcgcttctttgtcgatctgaatcagcagagctttatagctttcaccagcccaacgagcgccgcgaatatctactggatcttggaagtcaaacgcaccagctttagagcctacggtctgggtgaaaccagttttaccaatctgcgcggtgtagttgatcaggtcaacgatttcgcggttgatttccagcatgatttcagttgccaggattgcagacagttcggcgtcagcgtccataccgtgtacagcacgaagatcctgtgccagttcaacggaatactgtgctttcagttgacggctacgagcttcgataacctgtttgtcgatacggaaagccatttcgttccacgggttagcgctggaaccgttgaagttttcctggagttctgctacgctggtagccataccttcggaaatttcagccagagtgcctttctcgttttctgcgattacagcagcatccagagcagcagcatcagcaccagttacggttacgttgccggaggttacgttctggaagtacgcgacaccagtttcctggaatacgtgcttaacgatagcgccggaagcgatagcaacaccagttgcgatagcagcaaacgcggtgtttgcaccttcaccagaatacatggtgtctggagcgaacatcggatggaatgcttcacgaacgtttgcaggagtaccgccagccagaggatctttaccgtatacagcacggagtgcgaacacctgaccagtagggccagtcataggctgaacaccgcaaatgtcgaatgcgatcaggttaggaatcgcacggcgaaccataccgattacagcagggccgatgttggtgattgcaccgctggatttaccagaggcaatgttggttgcgtcgtaaccgtggtcacccgcgatctctgcttccgccaggaaaccgccgaaggattcaatgattttttcgtcgcgatatactggatcagtatcagcatccttttcctgagtttccagaattgctgcaaccagttgttttttggatttggtagcgatatccggtaaaccttcctgagattccagaagatcgttccatttttccatcaattcgtttttcttagacattgtttcttaccttataagattaggaaagggctttagccgcttgtacatatttattgatcttcgatttctctgctggaggtgtattttcattcaccggaacaaagtcatctttagtggttgtctgagtagtggtactctcttcaacctgtttttccgctttagtcgctaccatttcaacgattgcggtcagtttggattcgaacttgtcggaatattccaaaccttcgatcaggttctgaaccttttcaatttgcgattcagtcagatcttttgttttttctgaaacgatggtatcgcgtttcatgttggcgatctctttagcctgagcctgattagcttcgaacaggcgtttaacttcctgctgattctcggtcagttcatcttcgagttctgcaacaacatcaacctgcgcttctgggataactacgttgtgttcaacgaacagttctttcattcccattaccagagattcgaacagatcggccttgatatcacgggacacagcttctttgttttcagagagccattcctgcgcgatgtggtcgaagtatttattcgcatcttcgtacagtttattttcgatttcgccagctttttcggcaacctgggcttcaaccagttcatcggagcgttccgcgatctgggcgatgtgggtttcagcgagtttcgcagcacctgcttttacagcttgttcgaatacagtggtgaagtttgctttcgcatcatcagaaagttcaactgattcgaaaatgctgtctaactcaactggggtatccaggttctgggcttctgccaacagttgttctttaagcatttctaagtttcctgtttgatatgatattatttatatagacttttcaaacgttcagagagttttctgaaagcgtcatcatcagcactattattctcaacaagcgttttgcttgactgagattcggtaatcggcttaacgtaagcatctggagcgcttggcccccaaacaacatcaacgcctaccgccaatttaaacccttcttgtacgataccgtaaccttttccagaatcggaaagtttacccagtccgcgagaagaaacacctggaacccaacctgcgcgaattaacgccgcgagtttatccccatcaccgttatcaccttcgacaacaacagcgcgaccccaaacgtcattacctttccaccataatttttcaattaggatgcaagcattacgcggatcgacattcggtcgcggcgggtgattcatttcacccagagcttgacgggtattaacctgagttctgatataatcgtttactgcttcttctaatacttttttcggatacagtcgcttattgcggttaactttttcggcctggaggaaaataccttcaatccgaagtttaccgtcttttttcgactcaccgaccgattctaaaattgaatcggaaatatccgcacaaggtaaaccccattcctcgattagcagcatatcgccgttttcattgagttgggattcattcatatttatagccctaatgcggcgcgtttacggagcgcttttttacgcttacgctgtgcgcgggttgtaatagaagggtttgctcgttttgtttttagcgcacgacgcgcaatttggcgacgttgagatttagttaaaccagttgtttgatacgcattacgttcacgggttttacggtcttttttacgttccacattaccgcgcgaatctacgtgtttaacaatgacttcatctaaactcaaaccctcgacaatggacatcatagccagggctaaatgaggttcattgaccgccaaattttcgatgatcttcacagtgccgtcatcgatccccagaacatcaacacgggctttcgcttcggttaaatggggttcgagatcttcgacgctgatttcttcgagttcgagttgcattatttacacctcttattcgtctttatcgtcgtcttttttatcagacggctttttgtctttgtcgtcgcctttatcatcgccgcctttgtcgtcgtcatcgtcatcgctgtcgtcatcgtcggtttcaccttcgatgcgtacagcttccgcgagttcaacgcgcatttcttggcgaagggcttcggtacggtcttccatgatggaatagaattgcttcttcgcttccaccagatcaccgcttttgattgcttcgataaattctttcatcaaaagttttcctcttcctcttcgggatttttgaaccgttcttctttggattcttcttcgatcagcttcgcttgttcgtcaatgtcttcatcagacattcgaagaatctctttcatgatgtatttatgggagacatatttcccaactacaccttcaacctgtgacatcaacgttaggcgacgttccataatctcaatatctttcacttccgcgtaatatgaatcctgctggaaaatgaaggaaattttgctaacgttttcttcccattcttcctctgtgatgatttttttcgcgatcaggttagtttttaacggatcggaaagcacagggctgaactgaatttgcagtgtgcggataaacttactgaatttcagttcatcacgggtgatttcaccacccccaccgatttgcatacccccatcatcgcgaggcatacggcttaaaggcacacgcagtgcttcatagagcttacggttaaaccatttgatatcatccatatcagagaagttcgcaccgcctggaagcgtgtctacttcggtgatagctttaccgtcacgacgcattaaccagtaatcttctgtcattgacaggttgttttgctggttcttaacagtacccgttttagcatcgtacacaacgcggtttttaagcccctgtgcgatgttatttacgtactgtgtcgctttgttgccacccatctgacctacatcgatgtagaacacacggcgttcaggtgcgcgggtgatacggtagatgaccatcgcatcttccagtaaacgcaattggtttgctggcttgactgcgcggtgcagatatccgataatgttgttactgcaatcttccagaccagaatgcgcatacacgatagcggagcgcgggattttaaccttctggttatgctggtagatctgtccgttgtatgtatagccatttttaggagcgctatacacgaaaaattcgcgataaccacggaatactttcacgccaccatcgagggtttcagtgatagattcgcggatcagttccatcgaacgcggatcgagttgacgcagttcgcggatacctttgctttcgtctttatgcatgattttatggaagtagatacgggaatccacataccaatcacggaacagacgcgcacccatgttatcaaaatcatagatatttagaacgttatcaaattcttctacgattttgtcctggatcgccttactaaaatctgttttggcaagatccaaagtaatgatatctttgccctgttcattcacgatagcatcgtcaataatttcagaaacagcgttttctacttctgggtaagacatgataccgcgatatgtattgattaattgttctttgttctgaatcgccggatcttgtccagaataaaactgctggaatacgcttgcgtatttctgattagtcagatcagtttcgatttcataagcaccatcattatttttaggaggcgcgaccgaacctgtatcattttttaattgctgttcaagatctaattcgtcctcacgggcgaaattcttgaaaaagctaagtacattgccaaagcccaaaaagttcatagtaactccgaaaaataatgataggggtattgctacccctgtatttatagcctttattcccaccagtccagcgcgaaagtaacctcaaaggttgacacttcgttgttgctgtcccagtccagggtaacttcgcctacgttagtagggaaaagaccgtgaatggtatgttcggcggtaatttcatcgttacggtttttctgtttcaccgtagcggtttttttgtagttcgctggaatatcaccactaatctgatcgcccattccgtgcatcatgtttgaccatgctaccagagcgtcacgcgtattatgcgcgtcatcgttatagatcgtgattgtccagtcatcataggtacggtcaccagcaacgttgattttgcggttttggtatcctaccggaactttttcaactgtagccgctggcatggttgccgctttacacttgaatttaaagtttttgcccagatacgggatctctacttcgaacaggttcggacgtgcgaaatcaccggattcaaaggcgcgtaaaatgtcagtaagcatttttaacctcggattatttatgggggcttttcagcccccttgacgttatacggcttgtggccctaccagttcatcgaaatctgcgcccgtagacgttgctacgaagttcagagtgatgtagttgatagaacgaggcggtttcacgtagatcgttgctacaaactcgttacggtcgattacgtccggcgtgttgttcgtggtgtcgcagattacacggtaatcgtagcaaccacccagcgcacgaatattagtcatgtactgacctgtatccatacggaacgaagaacgggtgaaatcgtcgttgttttcaaacagtttgtatttcgcgttatcaccgatgtctttcttgatcatgttgaacaagcgacgaacgttgatacggtcaaatggactcggtacgttagtcagtgttttatcaccgaacagaacgaagccggaaccacccgcgaaaccagttaccgggttaatctgaacctgatacattgcgtcacgatgtgctgtgcgcggttcgatagccagtttgatacagttgcggatctgaccacggttgtaacctgctggagacatccacggttgagcaacgctatcagtgtaaacacacaggccagcgatatcacctgccagcggaacccaacggttcacgtcattgtatttatcatactgatatttatagttaccatccaggaagccataacttgaacttacgttcaggttattgtcaaccggagtaccaccactgagtttatatccagtacgccattcaatgatgttatcaaccgctgttgccagtggaatattcaccatcagagagcgcggaggcgacacaaacacagtacaatcctgacgttcatcaccgatagagataacgtgtttctggacggtagacatgatctctacagtttcaccagcacacgcaccagcaatcagcagaggtacatgcagcgcttcacgatcagcgaacatatcccaaccagtcatcagttcatcagcgcctacagtgtcgtttgaggacaaaccaccgccgaactcaaggataccggagaagcctttaggccagttcagggaagtaccgtaaacgtactgagagccaccgttagcgaaaaagtcatccatgaagatgtttacgccgtagatatctttatcggtcttctcagttgacacgatgaaggattcctgtacaatgccaccacgacgcacaacaaaagcgtactggttatcggtctgtggcccgtaggtcattacagaacgaccgctattcttaacggaaaccccagaagggtagcctgaaatcatagcgccagaatcgtaagcagctttggagataatctccacctgaacagttgaacccagttcaccaggatacagagccacgacagacgggatctgatatttctgggtaagagtctggaatgcggttccctgaattgtttcttttgcaatatccaggttcaacagagtgatccctgaatcgctttcgatgccgtcaatcgtaatagacgcagaaacaccggaagactgagaaacaatttcggtagtccagccagtagaaatatctgggtaagtgccaatctgtttagcacgggcaacgattttttcgcttgggatgattaccgcgaggatcttgccgttactgtcaacttcggacactttaccgttttcttctacaacaacgctgttgtattttactttaattacatcgtttacagtgtagttagaaccctgtgatgcgatagttgttttgatctggttgaaaattgcgcttgcgtttttagcggcatctttatcgacaacgcgaaccacacggagatcattaccgtactgcaagaagttaacagcactcatgaaatagtcagcggtcaagttgtctggggaaccaaaatagtttaccatttcgacttcgttagaaatctgacggatctgataagctggcccccatgaaaatttaccgacaatggcagcgcgaccagttgaatttcgaacaacggtagattgtaccgatgtttctttggtttcaatacctggagattgtaaagccattatagaatttcctctaatttatataaacgaaataccgtgagaaccaaccgaaatcgtttcatcaccgcttgtaacgataaccggacataatgcgtcttcgtatagctgttcgcgttcccgtgcaaaaacttcattggctagtcttaaatcgtctttctcgcagaattcggcaaatttcatttgagttgtaagccaaccgaaacaagcaagcgacataacgaggtcatcgtgatatccttcttccgcagcccacgaaacgcctttttctgagaaagtacgaaattcgagtattgtctttttgttatttatgatcaatttatctttctcgatcaggtctttcagcgtcgaacatcccatagcttttgatcgcttagtctgtttcatacccagatcgttgtagctgtcacaaataacattctcatattccagttcggaaaacagagatttggcaactgaatgccctgtgctatttagctcaatgtaaatccatgcctcgttatacatattcagataacgtaacaggatatccggcaaaataagatgcgacgttttgtttgagtgatacaccgcaacctgttcaaatggcatcgtcgtaatgtcgatgatatgcattgcatggtaatcctgtccgcgaccttccgctggatcaagtaccgcaacatatttatgcccctctactggacgtttatactgatagaagttcgtttccgtttcatcaatatcaatccatgtgagttttgacaacttccagccagcgatcagggttccactggttcccatgaattccgcgcagtgttcctgcaaaaatgcctctttgctggagccagcgatcatcttcgcagaccacgaataaccgtcatcaaatgtaccgttgtcgccgtctgtatacaatcgctctttaaccgatgtccagatcgccgtgtaaggcacgaaaccggattttccttctatagcagcgttccagatatcatagaagtggttaagcccgttaggtgtcgttgtgataaggattttcgatttacgaccagaagagattactggttgaatcgctaaccacgcatcaacaaagttcgggataaacgcgcattcgtcgatgtagatcatcgcgaaggagttaccacgcactgcatcgggagaagatgcaaacgcaccaattttacatttgttgtcaagttcaatagaacctttgttccattcaacaataccaggctgcaagaagtcgggtagtagttcgatcgcctgtttggtacgatccagaacttccgcagacatcgaggctttgtgagccagcacaccaacatatttatcttcgttgaaacacacgaagtgagccaggaagattgcaacaacggttgttttacccaactgacgcgacaggttacaggcaaccatacggtttttgtgcatttcgatcagcatttcgcgctgatagtcacgcaactgaaccttgattgtaccatagtcaatgtgggtgatcgcacaatatgtttcagcaaaataaacgatatcatcacgacatttcacccactccatcaacatttgttgcgtccatttagtctggatatacgcacgtttcaggtttgggttgccgttatatcgggttttcttgttgcctttatttttgtacgtggcaaagttcgaactgtccttagactgaatatcgaccttttgaatgccgttaattttcaggtagtcactgaacgttgtcggataccattttttatcgtgttcgctttgtgtccactccatccccaattcatcaattttctttttcagatatttgggatgcattaatccgatagggtgatctgattccttactcggatcgatcgtcggttccatttccatcagggtttacctctacagcttcaccattaatgaagccctctttgggttcatatgcactgccgtatttctgcatcagttccgtaggggaaccaacaaatacggttgcattctcgatattcatttcactaccaccaccgcccttttcagcacctggttttgtagtctcttccgtaatctcacgcatttctttgtgaatcttcatcaggccaatgtttgaaacgtttaactgattcatcaggcttgtgaatacctcgacgtggcgaggcgattcggagttcttcgcgttgtgtaatgcgatctgcgccatatccatgatcatctgattcatatggtgcgcagtcttacgcgcgagcgtataatcctcttccagatccggtttccggtctgctggatgtgattgaacgtcaaccagttcaagtttttcgtaaacaaccacatcctccccagactcaacgccgccagggagggaatcaatattcagcaattgctgcaaatctaatttttcatccattctcattccctcggcttaggaggttcatcaccagacgggatcggcttatcgtgcgagtacgtctgaatatattcttcgcccgtgtagtcctgcataggcaaatctaccggatcggcttgactatccacggattcgaagttatctttatctaacgggttcatgttagagaagaaatccgtgtaaacggttctgatttcgcctttaacatcagttacaggcgggtacagataaccctgtaattcaaacatgaatgaccactcaacatgacggcgttgtgatgcttcgccctcgaatgtggtatccggcgcaaccgactggagactgattttgatgtctcggtcaactgtgatttcgttcttatgcagttcggtaatcttgcagttgaaatgcggttgaaaatacggcaaaatctgttctgcgatctggaacatatcatcttcatatcgcgtatacacacccagttcgaaaatcagacgatatggcacagggttaaactgtgtgatcgtttttcgtggggttgctaactgtgtcattttttggttgaccgcgatactggttttacggattgcgttatattgcagatccaccagtgataagttcatgcgcggtaaaatcgtttccgttttagcaacgttttcctgactcaacgtgtagttaagtttgttcatggaagcgagaaacttctctttcgatgcataggtgatcggaacctttatgtatttttcttgatcgccgcgtactcttttaacctgaacgtgattaaaaagcgcccccatcaggacgatataattacgcagcgaactattataccaataaccaaacattttattttcctgtatgggttgttgggtatagacttccgcctatacccatataacgtatttatggcagacttgcaaacggtgaaccgcgtccgttgacaacatcaaaagattcgatgaattcatcaccttctctttcaaattctttgtcttcttcgtactgttcaatgttgatatcagccagcccgtcaagatttcggataggttcgagatccagttctgcatcaggttcgatgtggattccttcatttcgctgcaattcaggagccagttcttcacctgtgtagatgaatttcgccaggttgattttgcgttgaggacgatcaccgaactgatagaacggatcggcttctacccacgtaatttcaaacaggctattgtccatagggaaataaaccagatcccccagaacaggaataccaccatcagtttgatgtgcgaacaaacgagggttaattaccagcgtcatttcatcgtttgaactcagaccaaatttactaaagaaatctcgttgtccttcataattggcatatgattcaatatatgcagcaattttccatgacttcgtaaatttggattctcggtcttcgcccaggatcttatcaatattcacgaagtcacgccggacgtaatacatatcaggcgatttcatctggattgattctgctgtcagtgaatcgtgtagctgttgtgtcgggttgtatttgtaccagtttacatacgggttagtgacctgatcctttaagttgcgatcaaccccttcccccgtagacaactgagcgaataaactttcatcccagttttgcattattccccctacaccataatgatcggtactgcgtcagacatagaaatcagttcatcgcgcagactttgcagtttggtttccgcttcctggatcagtcgcgtaccatcaggagcaacaccgccaggcaattgcatcccctggaatttagccagaatttgtccgttgatctctttcaccagtgcggtagagtagtcttttacccagcggttgttatatgcagacgttccgcccgtaacagttgaaccctgtcccgctcgtacaccgcctacaacgctgttatacgggttttcgtagatgtcggctatggattggtcttccactgcgttagaacccgctgtagcgtatcctgcgacgcttcctacggagctagggacatcaacgaaggaacgaaccatcgcttcaataacgataatgtcgcctttgttcacctgcccccatgcgcagaactgaccagtatcatcgttgaaccagtaatcaggcagtggagccagcaggtcttgcattgagcgttgataggacatcatctgggtaaagtagcccatatccgcgccgtatgcgttcataccgtacacactcgatgcacagcgcccacccagagagccaccagtcaaccccatcaggaaatcggtaaaccacggataaaccgctgtaccgtccattgtggtcaatgaacccatgtttgtacgcaacaccttcgtgatcgcgaagatgtgttctttgctcaagtcgaacacgttgcgcgggttatcatcacccagtgtcaaaatcagatacgttttgtttgtgccgttataatgatattctgcatacaggtctaaagcgcgttgaatgcagtcataaatctgatcttgtgtgatttcgattttgatgattggtgcgcccagacgacgaagaatttcatcctttaactgttctggattattcgtaatcatatgatcctcaaaaggggcttgcgccccttgttaaaattatgctaccgtcacagtacattcagcggaggtgatggtcgccggagaagtcgcggaatccgtaacttcaactttgtacacacccgcttctgctactgtagccaggcttgcgccagtttccccagtaacttcaaccgtatctttaaaccatttgtatgtatatggtgttttgccaccagtaacaacaacggctaaatccatattatcgcctgttgtataactcttcgttgccggaagatccgttgtaaacgccagagccggacgagtagttacagtcacagtcgcggttgctgaatcgttggtactgttcatcgcgtcagttacggttacatagtaatcacccgcatctgcgctggttgcagcagacttgacgatagaagaaccagtttcaccactcaatacagatccgtctttatgccatacgtaagtgtacggagttttaccaccgctaaacactacttccagagtcaatggatcaccatcaacaacagaaatatcgctcaagtttgtatcgaactgaggaaccgtatgtaccgcaatgtcaagttcatcagaagtaatcacggtattttcagcgtcggttacgacaactttatatacgccggaatcactcgttgtgatgttctggatcattacactcggtgaatcagtcccgatatttgcggttcctttcttccactggtacacataaggcagtttaccacctgtaacggtaacagataaagaaatatcatcaccctcgatataatcgttacgaccgaccagattttgagtaaatgacagtggaactttcttcgcttcgtatttgttatccgcttcaacttctgtgatatacggaaccagagcatcagcaacatcctggcgagaggctttattctgttccagatcgtccagacgttgttcaacgttaccaccaccgccagcttcgagagcagcaacacgcgcagtcagatcggaaatcagtttataaatccctgtttctgatcctgtagtattaacgccgatcgcagttttgttatcgcgagccgttttctgaataccatctttgaggaatggatcagaactggttgcatcaccataaacagctttacccatcgcgatattagccgcaacgagtccagttgacgtattacccacaattgcggtaacatcaaccagtgcctggtgatcgtcgcgctgtgtgttttccacattcagcagacggcctttgatgcttgttggctgggagtcagtaccgatatcggtcataacctgcgccatttcaccgcgcagaccatcatcacttgtttcaccaacgatcatattcagatcgctaatgctacgtttcattgtgctgatatcgtaacggatactacctggaacctgtgagttaccaacagcgctttccagaaggattacgcgaggcagaacaccaacaaccggatcattcatctgggtttgcagagtagtaatgttcgtttccgcagtttccatgcgggaatcaatactaccagaaccacctgagcctgtacgcccgatataagtgttgatgtttgacagttcggtattaataccagtgatatcgccaccgataccattcagacgaacatacacagattcgaaagtggctaaatgcttcggccccatttcgttacgcagatcggtaacttcatcggttaaattacctacatctgagtttacccagtcatcttccagcttagtaatacgtgcttcatggatagataccgcctgagcgttagccattaccttgtatttcacgccggagccagtagaggacggatcaacatcaccatcttcgttaaagccaggatatgcacccagttcatctttcaggaaaataatatcttttcgaatggtacgatgtttaggatcggttgacgcatcccatacaccaatttccttttcgatatcctgaattttcagggtgttgtttgctgtagttgcctgtacagcagacatatctactttcagcacgtcaacatcagcgacaactttatccagtttgtcgatcacactatcatcagagatcgccgcgaggttttcagtaatgaggttaacctgatcgataacttcgttgatttttgatgtctgggtagttgtatttgcttctaattgtaccgcgttcttttgaaccagaacaccgcatctgtttaaagaaccctcgttagtggttttggtttttgcaccatcgagagtttcgccgttaacaatccaattgatctgggtttgtgtggtgtccgcagggacaccatcaacaaacgggatctttggtaacgggttaagttttgaaatcatggattaacccctttatcgtactcgaattacgtagttgaccgcaaggtttttcattcgcgtttcatttccgccagtacctaatgctttgctgtaatcgttattcaggtgcataacacgttggtcatttttttccgcgcctttcagttcataaactgcttgactcttaggaagattaccgccgttctggtaaatcatctggagatcatgttcgtgatacgcaaacatatcagcctgatatgtaccaaaaccgcgacctgcatccacaccacgcccaccatcaaagccgcgagctacaagaccgcgcatatcaggcaagttgaaaatatcaccagaaccgccgtatgtataaccaattcgggcaaacagttctgggtttgaattgcggttcattgctcgcccgttacagataaacaagttaccaacatcggcgttaaacgctgcaagcatcatacatccgatcgggatatttgcgtcaacatctgtctttgtctggtatttattgtcagcactaatcgaaccctgatacaatgcaccaccagtaattgcactgtttttgttgctcggtactacgttagcaccagcagacaaagcagtattcgctaatccggtattgatatctgttgttaatttaaccataccgaaagtagagccggaacccttcacagcagcgagtttttgcggggtgatcgctttggtgttatcagtacccgcgtttacttctgcctgggtagcgatacggagtaaacctaaatcactttcgcttgcagtcagacgaataaacgtgtatggtgaaatcgcaaacccatcgcgaatagtacccgcgcgaacttctgcaacagttgctaactgaacaagaccaaacgaactttctgttgcgtttgcctgtaccggaaccagagcagagatcgcttgcttcactttaagcggagtcattgcggtagtgtcatcagtaccggatgttgcctgagcagttgttgacagtttcacagaaccccaaacgttttcttttgcatggcgggtgttaaacacatagttcaacgagcgcggagtaagagaaaccagatcgtttgttactgttactgattctgcatcagttgcgtaacgagtgtaaccccatacggtttgtgatgcatgagggttttgcagacggtattccagcaaagcaggagttacgatcgtctgggtatcagtacccgcatcaatcattgcctgtgtcgcaatagcagcaataccgcgcacaccaggcgcggcattaggcaaaccaacatcagtacgcgcccacggcccaatagcggctaatgcctgttgtacgttcttaaacgtgctaggccattgcgtaccagcaggatcaaatgtcacgtaaacggatttatcgcttacgtggttaattgtattgttcatttgttatcctcatgcaatacgcttgaaataataaatcggaactgctggagtaacagcaaggtcaatttcacctaactttgtccatgtaccgtaaccagatttagcctgtacgtcgattgttcctaccatcgaaattccgtattcagttttattagtaaccggatgcggaactgaatcaataaaacgaacttccagaatttccccgttgagacctttacgagtaaccaaatcgaaatatttttcatcgttgacgaattcaacgaatttgttatagactgtctcacatacggtagaggcgttcgttgtattgtcgaaaacgaacgggaaaccataaacgtgaatagtcgcctgtgtttgatctggatctgggtttgaaaccgtcccatcaaacgtaattgattctacctgttgcaccgcagaaggggggctatcttccgtcatcatgattaccccattgatcgggatctgttgagacaaagaatacaggtcatcaattgctgattgtacgttagggtaatctaccccttttcgaagctgatcgacgtttgcaccaccaatagtacgtttaccaccaatcagcggttctttcgtacccatttcatattgcaaaaagtctgcttcacgggaagggactttcgccccctcccttgttttggaaataaactgagtcatttatgctacccttatccagcggtgaacagtaatataaggcgggagcgtttttagtttatctggagtagtgttcccccgatttacttttaatacatcctcgcggtatttagtgtaacctggccctgttgcatctgggtcaacctgacagccaccaataataatgatcccgttgtcatctttaatcaacaccttatcggttgactgaatttgtggaacgttgatcggtttaatttcataaccacgttcgccaccagtaccaccagaagtgtgagttggttgaccggaaccatccagatcgttattgttcagaccaaaatcgctatccgatgcatcggttgtccaacctgcaaggaacataccttccgcgtaacgtgtccagataccaaagcccatataatcgcctgggttagcatcattatgcgcgttttcgtagattgtcccgattgggtgaataacatcaaagaacgcttgcagatccagaagacgaccgctaaatgtatccgctactttacgcgaggttttctgcgttgggttgttataatcggtatattcgatctgattaaccagcgtcacttcttcttcgttgttcaggtaaatcttatcggtgtgttctttaataccgcctacaccgtcccattccattacagtaccgatatcattgttgaaccagcgaatagttaccacatcacgggattccagaggttgagcaaatttaatgccagtaaccacggagtcaacaaaaatcagactgtaatcctgtccagaaggaacccacgcgccggagttcgcaatacagctatcttcatcataaccttctgcgccctcacaaacaaatgtcgggagatccgcatcgcctgctttaacaagctggcgaccgttcagcagcagttcgaacgagttcgggttaatcaaaattcgcggactgataccaaattcagcattagtgaacgtgcgtttgtttggtagatcaccaacccagatttcaccagggatactaacctgttctgtgtctcccgtgttatatacgcgcatggtatgcgcttcatacgtcgctcgccatgcggcaataccatccagataggtaacgaattgaagcgtgtcaccagcgttacacgggtttttaagacggatatttacaccatccagatctaccagttgtccggcgctcgcaccaggtgaaccgtaatcgctgtttgatgaattaaacccgttcttgtcgtcgatgtacagcaagttaccgcgatagtaaacttccagtgcgcggacgttgtacgagttaccagggccgaacacgttcaggaagtcagtttgtccctgagtcgcgatatacgtttctttcgcaacggttgccagatccgaagttgtgattttgtcaacctgtttgttttcaacatattcccaacgtccaggagaacaataaacaagttcaacgtccatcaggtctttgtacagttctttgtaagtcggtgagcctttgatggtatcaccgcttgcagggacgatacggacgttgtttaccgcccacttaccccatacgtcacgtaagcgaataaccttgttataatcgcttacactgcctttagggaggtttaccgtaatacggttgttgctggtattcagcgcccatgattcaccgaaaataggggtcagcgtaggcgctgtgtgcgttttccacgcacccgctgggtgcgggatactcccgtcacccagtttattatataactcggtaaagttggcgttagtcttttgaccaccacgacgcagataatcacctgcgccgtcatcaaccacgttaccgataagaatttcttgtttcatgctgcgatccctgatttaatggtgtcaaccgctttaatcgagaatttaatgcgatcctcggttttggattgtacgtttgcgtaaacaatatcactcgcaccaacagtgaacgtaagcgtgtacatttcatcttcgctatttttgagaactgcgtattcagttgaatacacgcccttagcgacacggtcaacagacaaaagaatttcagccattttattgactgtgcctgtcatattctccgcgtacacgagaattttcgccccactgaattcactataaccaaataaaggaattgcggtcggtgatgctttcagaatgagtttagtagtatctacaggcattgtttttgaaccaaacattgattcaacagaataatcccatgtagtaacggaaccttctttcttcacacaccagattttaatctgagtatatggagaggtcacgtaaagttgatcctgaacccctttgataccatcaccaacttgcggacggaatacaacaggacgatcaacagaaatactaccgttactatttatgaaatagaacccttcgccgggtttacccgatggaagaacaacagtaattggccctgttgaagtatccatatcatgcaatgaacccagttcgatcgggttgcctgaataataagttcgcggtaatttctggaaatatccggtcgcgtggagtaacattgtacccacaccatcattcgcagtcagtaaacgcacatcaccaaacgcgttgtatacgttggtgatgatttcgttaagtttaacaccgccgtcatacagcgggtcaccagttgacgggttgccgatttgccccacgtcaattaattttttaccagtttgatatgccattatggtttccttagaattcgaaaataatactgacttcttcggtctgatcaggagaacgaataatcggttgacggttttccatgtagatcatttgtcctgagtcaagttcaagctgtcctttcgtgtaatactgccccgttgcttttacttctgggtcggatggttgcgcctttttcaacagcggatttacaataacgctgatttgacggaacccacggttgccaggtaaagaggcttgcgggaagaacagggaatccatatacgcgcggaatcgcattgagtgaaccttcattcggtacaccaaatcgtacatatcaggataccatttgatcacgttatcataaccccaacgaaccggatcttcttcaagttcatcagggaacggaacaacgatatgttcatttgtacagcggttgataacaacatctggtggaattgtatacagatattcccagatatagccgtcgcccatgtcgataccgttcgcttccccgcgcggaggttcgatcgattcgtgggtcggtgtccaaatgccaccaatgcgcacacattcaactttacccgtgatactggagattgaacaagatccaatatcaggaacgtctacaacgcggtataccatccatcctttaccgtagtcagtacggttataaggcgcggagtttacaaccacgatgtcattaatgtaaaagatttttgggtttggatatcgagtatcgccccagtctttacgcggaacgattgcatcaatcatttcgcctggtactttcgtcatcccgatcatatgcgtccacatatcaacgataccatctgtatcatcgttcggataagggggagcgaattcagggtcggattcgttatccgcccattgttcggtacgcccgattgacatataaatcgagttatgatcgggggtgtccccgatcatttcgcgaaagttcatcatgttttccgtgcggaacttaccagttacgaccgcacggtagatgttttgttgagccattatgctacctttctctgagtcggtggattcggatcgcgaggattacccgcgtcgtctttcaatcgtttttccactaagttacggaactgagagtatttaaccgctgaactatcgaacagaggactttgatcaaatcgacgcgcggacggcagtacaccattcagcggtttttcatcaatgtcatattgtggcggaacatcaaacggttgtcccgctttcgggtgcgggtcgtacaatgcttcaccagttacaaggtcaaatgtctggtttccgttaccgtccagacgtgctacgcgatcaggccaatacttcggataaccgctatcgaagcgataatttcgaagaatgtcaatgatcgtttcactatgcgtcatagacaaaccggagttgatgaacaccgttagcatggtgatcccgataaagccaaagcctaccggatgcacgaatcgtaaaacgtcatccttataacgggacgctggcagattcgaacgaattttcatcacgtagtaagaacgcccacggttgaagtagtcgatcgagttgttcgccatttgcttaccacgcacaccacgcagaatagtacctgtgaagttagtcttttcagacttgacaacctgcccttcaaggaagttaccgatcacgttgtgcagcgttaccgaccaacgtaattgaccgtcatcatactggcgttcgatatacgtcacgtttgctctcgctgttggtgtgtaaatcgtccggcctacaatgtcctggttgatatttgttgaatgaaccagaatatcatattccagagtgttcgaactttcgatttctacacttacatcttcgttatacaacagtttgaacaggaatttatagcttgcttcgatgcctttcgttgaatagaaatcactacaacgagattcaaagaaacgaaccacctgatcacgcttcgttttatccaggtagatattacggcggtttacttccgaccacagatattctacgctgttcttctcacgcggatatttgttcctgatcaggttcagcagcttgttatagtaggtgttttcacccagcgaaacgaactgcaaatagtattccccgaacttctcgaaatactgctgttccagatagctttgaggcgcaaagcgcgtaatcatatggcttaaatctgggtcaatcaaaccaggtgacagatccggttgatacggtttttcgcgttcctgctgaataagatcggcaatcaataacgtattgtctggtttccagaaaatcgttaagttatcgcgagcgcggtaactcagttcaaagaacccgatgatttcgcctgaactcttatacagcaacacgccgttcgtatactttgtgaatccggtaaacttaatgttgttaatgtaaatcgtaacatgtccgcgatcccatacctctttgttcacacgaagcgatgacgaaggaccagcactatcggttacaaggctgtaggtgattttcggatacaccaccagaggacggttatcattagtgatccatgtgcgcacagagtcgcggaagaaccagctataattcgcctcgttgtaatattcctgcgcaccaaatttccaaacagtcgggtcgtcgatatgagcgcgaatcgtcgcaaagttaatcgcaaggctggcagtatagccaggacgcaaatcatattttacagcaccaaccagtgcagggttctcgatcaacaattcaggatcgggaagtgtgcctggatatttgtagttcgctacggaaataaaaatctccgtgccgttcgttgacatattggtgtattcatgctggatataaaaacgttcttcctcggtgttcccgtacaggcgcacaaaggttttcgtgtcttcttgccattgatacacaccagcagcagcggacggaaccacgttagcgggttttgtaggatcttgcagagcggttttcacttcacccgtaacgagtgcataaagaatcccgttcatcacatccattttcttgacaacgatcttatcatttccagggacaactgtatagcttgctgtatcgaaaatcttttctccgaacgtcggagaactcggatcggtgtcgatcggtgtctgtttcagtgcgatacgacgcacaacgtttttcgcaaccacataaagccagtcatcggaacatgccattgcttctgcatatttcgacacgttaccaggcagtttagcgaatgtgttgtatgagtctacgtcgaaatcaaggccagtctggttccccagtttggcaaacgtaacgtcatcagcagagaatcgcacatcgtccgcagaccagcgaatatccgttgaggtgcgcccgtagaagatacgatcgtaacccagtacataggttgtgtttcggctttggtacgcaatagagcgcgatacagggtttcctacgcggtcgttaaatgctttgtagtaatgccatgtctgccctttgtcgtttgacacctttgccatgttctgaaaacgttcaaacaggtacagcaaaccgtttgacgctaccaggaaagttctgttaatgtcattacaaacgtgttcaatatgatcctggatttcgtgatagttttcttgtgtaagaattttatcgctgatctgggatacgtcagtgtaaagtggagaaaacacaaagtcttctttcatcaacgctgccattaccacatctgtattgaagttaacgtagttctgattgttctttgcgaatttttcgtttatgaatgcatcacttggcgtaaattcacgcattgttgaatatgcgtaggcgttaaggctgaacgtccataattcatctgtataaacccaatcagacggttcaaagcccttgtgcgtaaccatgacgcggaatttataaaaattgtttggctggacatcggaagaaaaccattcattcaaaaaagcgtaacccaactggaaccaggttaaatcttcatctggaatagtaacaccacctgccccgcgagtttctgccatttccacgacatagtaaaaatccatgccgacgctatcccacttcaaataaacgaagttagcagccagtttatcaacgcgcaaactggtaattgacggcgctttaatcattatgtttctccaaatttgcgttacttatatcccatatttagcaaacaaaaaacccctgccggatgacaggggttaaaattattgactgattggattcattgtcaatgttgtatattgaggacggagatcgttttcaaacacaatcagagaaccatcacgggtgaaaatgttctcttccaatggtgtaccagtcagttcgatataagcagcgctgaatcgctcggatggaacgttcaggacacccagatcgaaactaatgaaatcagtgtagtgttccacatagccgacttcgtaatatttattacgatcggtcactccaggatatttatcaaaatcggttcctgtataggctgcgatactgatatcaccgtttttgaatggcccgataacaatttttgcacgtccggttgtggtgttcatatcggttgatgcataacgcacatcatacgaatcaccagcagcgtttgtgtatttgaacccgttcgaaacaacagaacgtgatttcacctggtttaagaagtgaataccagacatcggagcgctgtaatagttatcaagttcacgcaatagctgaatagtcgcagaagaaccaatgatcgacacgtccgcgttatcaacataggttaacattttggacttactgaatgatttgttgaaaatttcaacgttatcagtataatatctgtcaacctcattgattacttgaccacgcaaccattcctctgattcaaccaacttactgatatcatacgttactttgatactttgtacgatgtacagatagttcgggtcaaggatcgacggcgtaatcgtcgcaaggttatacttcgccagatagttttgcatatcctctttttgaacagaggtcaaacgcaaccctgatttcggtttaaccgcgatgaacgcatagccaggtttttctttatcagtaaagcactgaaccgcctgaataacagaaccgaaacggtgagacaagaacgattcataatccgatgcagtaacacaacggcgctgtgtctcacgcatgataggcgcgagttcgcgaatacgttcgatatcttccggttcaccaccaccatcagcgcctacatagtccgctgaattagtcgggttctcaacaatactcgtaatgctaatgtttgtcaacgtatccacgtaaacaaagttttcagcaccgtttgcttcttcgccgttggttgaaatatattcaataacaacggttgaaccgtttgcaggtttcaagcccccgatgtaatcagcagtcagagcaccacccgcgacctgttggctggtttcaccttcaccaaagtaaacttcggtatgtccatcaacagtttcacgcatatagaaaacagttgatgcacccgttgcgtttacgatactttcgtttgtccagtcatcccattgtgcgccgttgacggtaacacgaacctggctacggtcgatgtttggatcacggatcaggatagtcgaaccatcaaagatgacttcggtacggactaaacgcccctgaacgatgttcaacatcgaaacatagttattgtttttgtcacgaacgatcaccacgtcatcggatacgacgaacgggaaactgtttgtttctttcactgtaccgatgaatttcgtaccgcgtggaatacggatcgatgttgggttcagtgggtttttcgcagtgatcaggatcgaagtatttgcagcggtgcgggagtccggcatatagcccaaatcctgagcctgttgaacaacagaactacgcaatgcagcggtacgaataaacgattcgaacagtgcggtgttactcatttgctgaatgtacagtgtacagtatgataacagatccacaagtacgttcatgcgcgagccggagaaatcataatccttgaattcgtcctgacctcggagccagttgattaagtcagatttgatttcgtcaaaagtagccccgacaaagatatcggggatctgattaatttgtttctttgtagtagccattattacccctcgttatcgggtatttagtattgaaccatagggacgcaaacactaattgaaccgaatgtgatcgcgagtccgattaatgacaataatttgtttacgtattgagttaccttacttagagcaagcgtacaaatctggttataaatcaccttgcatgtgtccttaaacgagcgggaactgtcaacaaagtttttatatagcgattgtgcgcccgtcagcgcgttctcatacgtttttaacaggtcatcgaatgcaaccccacagtaacctaagaactggttaatctgagccattacaggcagttttttgagttcagccattgccatgctgtaggtgtctttcatcccatcttgcagagtagcaatctgtgctttgattccctcatatgcggccttagtcgcattcacagcagcgttagcggcatcaagtgcagcctgataagcagcggttgttgcttccgttacaggttcccacatccagtttaggtactgatcgaacttgcgtttaatcgaatccctttcctgtgtctgtgttttcagggtgttgaatagttcttgcccctgatcatacaatgcggagatctgcgcataggatgcatcaatgaacgctttcactttcgcttgtgcttgctgatacagatccattgctgtaaaccctgggaagttaccgcccagaatcacatcaagaggtttaatctgtcgcatgatgttacggatagccagcaccgcagaccaaagcgggtttggtgtttctggaggcattgaccagatctgcatcatacgcccgtacaaatccaccagagcaacgcaaccgttttggaacatagtcaaacaccagtcaaataacgcgctacaagcgtctacaaggtcgcgagcgccagccttgacatattcaacggtgtagttgtaagaactgcctatagccccgtagattgcgtttatgacgctttcatacgtctgtgcgccggagtcaatcagagcctggaaagaatctttcagggattgaaccgaactatcaccaaacaccagatcgtaaatgttgattgcaacacccaggatcgcaacagtcgggaggaagttattgatcagactccatgccccacccacgatgttaaacgcagagctaatgatctgccggaacaccttcattgcggtttgccatgcttgctgtgacaatgccagagcacccgctgtgatttcttccatcccgatcgaaagcccgtcaaacatcgtcgcgataccagagccgtttttaatcgtacccgtcagcatatcgaaagccagcttgaacgttttacgagtctcgttccacgcggaaagcatagcatcgctgatattcgtatacgggaaccctacggtcgccggaatacagcccaatccagagcgagcagaaaacaatctggcttcactcggtagcgccccatacgttgacgggagagcaggaggaaccggaggaatgctggtatctgcgttcgtgtttactgacatccctgtatatttgcactggtgcgcgggggattcgtcgtgtttcatgtacgcaatacgattaccattccagtagtaatcaatgctggtaaacgcgcctgtagtctggttatatacctgtcggattcgctgatcgcaacgggggccggaagtcagcaagtaaccaccggagttttccaccttgtacatcgcgagttcgccagggttcttgaacagattcgcttttgatagatccgccccgtaccagtcattacccgcgagcttagtagccccgatagatgcgatataggcatcaatatccgcttgactggcgaaatagtaaccaatcttcgtaaccagaatgtcagtagaaacccctggggttccgtctgggttcgtgggtacgtttggagagttcaccaccggaagcggatcgcttttctgcccgaaaggggaactcgtatacaggtgagttccgatcgggatgatttcggtcgcccattctaccccaacagcagggtaattttctgtgtgtccctgccagataacgcgtctgtaatatccagcggggatctcagcatcgcaaggatgctgaaagttttgcataatcccatcaatgatggtttcataatccatgatcatgtttagcctacctgtacagtaccgccagtgatcttagtcagtgcgccggaatcaatgaaagtattattcgatgctcgcatgttgatattacgtgcgccaatatccaaatcttgctcaatatcaatcagagcattttttgcggtaattgttgcatcttctgttacggcaacggttgcattctgtttaacgttagccattaaattctgattcacgtttacggttgcatctttttcaacggttaattctgcgttgcctttaatcagccccacatattcaccttcaacggtttgatttacattaccgcgaacgaactcggtcacgttaccatcaacggtctgttgaacgttacccatattgtaaatgaacgcatcaccctcgataacaacctgcaaattacccttaacgtttaatttacggccttgcatgacgatttgataatcatcaccaacgattttaacaacacgggttccatcagggcgaatttcttcgtatgatcctgctgggtgaacacggttgtaacgttcaaagcctggtgtatcgtcgaattcctgaatgtgtccagaacgggattcgaataccatgttgtatggatattcagcattgtatgcggatttaggttcctcgaacattacgcgagtatcaccaggaacaaaaggatcttctgggtttgatgcagccaacacaacagcattgtatgcagcactcaatgaacgcccttctggatctggaacctgaacaccgtatgattcaaggttgcccgtcagcacgattttagatacgcgtgaagaacgtcctggtgtctggttagcccatgttgagtttcgcagttcgttgtaagcggtttgccagtcctgacgcttcatagcagccagagcattagtaaatttggcaacaccaccaacacccatctggaagcacatgttttcgattgccatttgacgaggacggtttaacgtcacgtatacttcgcgaacgtttgaagtgttgctgatcccctgccggacttttgccaaatcctgagcaaacagcgttgaaacttcttctgctgtgatcgttccattggttacttctcgaccaactgctttactgatcgcggcgttaatcttcgcagtatcacgggttttttccatgataagcaaatgcccgatcccgatagtcggataaccttcactatcaatataccattttgtgcggataccttcatcctgtttaagcatggtttcgatagtgaacccgccagtatcaggacggttatcttctgggatctcgtcaagtgggcgatcatctggattgacagctaacgaactgttagcatcacgaataatcacgctcgaagaaccgcgcccctctgcgccaccgcgagccagtacgttgacatcgttacctacataacgaggatactcaccaaacgggtcacagaagcctttctgggtgtccggcttctctcggtactcaccagcaaaggttcccagtataacgccgtcctggtgccatttatcgcgccagtaaccgataacgaaactaccgcgcgtgataccagtcggggaaaaaccaacaccagaaatagcggcgctgcgaatatcctgaataggcatcatccacggcaattcctcaaccggaataccgatagtttcagatttttgtttctgtgccggatgctcaccgaatacacgcacctgaacacgccccagtagacgaggatcatcgacttcttcgaccaccccctcaaagaaaggggagtatttatttccaccgtatttcataggtttgccttttccatttccttgatataatcgcttacaaacgattgaatatcagaggggttaataatcttgatggttcgttttgcttcattttgaagcaccgcatcttcataaatatctacagggactaatgttccctggtactgcaaataacgcatgttcttatcgcctttgtcataccaatgaccgggattcgtagggtcttcaaccaaattgtaataacggttgcccttaccatccatatgataaagaacctgttcaccacctgcttttgaataacgctggatagcgcattgataagccgtttcctgatcggtaatccatccgtaaaacggatcgtaattatcgttaagcatcaggataacccagtagtattgctggtttccgtatagcgtttccgctaattgttcgggtcttaatgaacctgtcagttgatatgtacgcggcttataattcctgatcacgcggttaaagtaaaaacgataatcgcggtagatatcagtagttggtgtgcctttgtaatcaactggtggaaagaacgaaaataacattgtaatttcccctatctaatgtttactatatttaggatctaaaatggctggaagacagacatacaaggggtcttttatgccccagaacatacagaaatataagggagatccgcgaaagataacgtatcgttcaagctgggaaaaatatattatgaactggcttgataaaaacccgcatgtgaaacgctggaacagtgaagaggttgtgatcccttatttcagcaacgcagacggaaagcgacggcgctacttcatggatttctatgttgaaatggataacggtgtgacctacctttgggaagtcaaaccgatgaaagaaacgttgcccccacctaagccagcgaacaacaacgttcacaacaaaaagaaatttgttgatgcgctgtatacttatgcggtaaacattgacaaatggaaagccgcgaatgcagcagcaaaacaaaagggctgggagttcaaaatcatcacagaggacacgttgaaacgtgtgttcggatggaaagggcaataaataccctaaacggagggaattatgagttttatttttgagttcgagatcatcgcagaagaagacaaaccaaaaccgccaccgaagcgaaagctgggtgaatgggttgaacttggtatcaaattccgacgcgcaaaattaaaaggcatgacagccaaaaagttcgcggacgaaaacgggattgcatacgcaacgttcacaaagtctatgcaccgctataagcagcagattgatgatgaaatcgaacgccgtaaagcagaaaccgaagcccgacgcaaacgtaatgactatcgtaaaaaacacgcggttgatatcgtaaacgatttccgcaacagtttgaagaaaatgactgttggtgtaaccgctgcgaaacgtcagaaagattcgaccgattggtttggtgatttcatcaaaaccagcattaagacgcacagggttgcgaaaccagcaacgggtcgcttgtatacgttcatctacgatgcgaaatacaaagacacccttccatactgggatcggttcccgctgatcattttcctgggttcaggacgttcgaaagcgggtaacttggttctgtacgggctgaacttgcactatgcgccaccgcgagcacgtcaagagtttttagaagaactcctgaaacgtggctacggatcaacagatcgactttctaacaaaaccagactgaaaatcaattggaacaacgtgaagggaatgcgcggggctgatcaaatgatcaaagcctacctgccagcccatctacgttcaccacttgcagagatcgccccaaaagattgggcgaaagcagtttggttgcctacacaggctttccagtccaaaggaaaaccatacagcgcgaagaaagtttggaacagatattaacaaaaagccccaaccgaaaggaaggggctttatttttacagggtactcacgatttccgcgagttttccaggggttgcgccaggtcgaaccttcatcgcatctttcaggtttttatcaaccatcttttctgcgtctttttcgttaaacccacgtttcaccaacaccgcaataactttttcgcgaatatctttagcggcttcgttcaaatcttctgattcagctagaaccagtttagacagaacatcacctttgtattcctgggtaaaacgtttacccgataccagacgaggcttaccagaggcatctacaaccgtaaacacggcgtattcacctgtttctttggttttggtacgtccggtatacagcaagcacatatcgttacttgggagcttgtacacctttcctttcaccaatgcttcatccagaggcagatcaatttcgaaatcttccgccaactgattatacagatccaggttttcttctgcttctttgtacagagaagcgcctttgaatttcagtggcttgtcgaatttcaggtcatcagcaggatcaccgctgtagaatgaaacagtacctttcgcccagtcaatatacgctgcctgagtcttgccagtggttttacctttcaggcggacaacacctttaccgaagtaagcgagatcgtgggagtccggcgcatacacatcgtaatcagcaccatgtgcaaaatgcaggaaaccaatctgaccttttgcagcgttaccacggtcaaccagatcaacggtcttagcaaattttttgttctgaacagattcagaaagtagttctttgaatgatttcatgttttcaatctcttttgaaagtataggtatagtatacctatttattgaatagatcaactaaaaattagatcgcgagcgaagcgagttccgtcaagcgaagcgaagacggatagttaacgattgtataaaaagtatacggaaatgtactgttttctctatatataaaatataaatattataaacagtacatcgtacataacactcacttcgttcgtgtgttcgcttcgctcacggtcttgatctaaatatctataaaatggagatcatcatgaatacaactgctatgatcctgaaccagatttcacctactaacttcatgttagatattcctgacaatgattatgtaaaagggttgaaactacaggttcagggtgttacactacctgctatcaacattccaattacggatgtcccactgaacccaatgattcgagggaagatcccaggatctgcaatggagttcgatccactgactattcgttttgctgttgatgaagaactgcgatcgtatcttggggtttacctttggatgctcggtactgtcgattttaacaccttcgattccgtgcgttggagtgaaccacaacaggcaatggctttgcatatcctggataactcgcagtcaaaaactgtagcgacatttcgcttctatggcgcttggccctccaacctcggagagcttgagcttatgtataccaatgattcggatgaagccgtatcctgtatgacgatgttcaacttcgctcacatggaaattgagatcgacggacgggtgatcgtgcctactccacggaaaacgcaaaaatgatttatggtatttgtggtaaaaagcgaacgggtaaagataccgttgctcaaatggttgtgcataacttccgcaatgttgaagttatcgcgttagccgacgaaatcaaagctatcctgaaacgttctatggaacatcacgataacacgcaattgcgagcgctggcagcgaagaacccattctatgagggtgatcgtgaagccccgctggtgatgtccaataacgatgcatacgcgctgttttctagcggtatcaaaaaattaagttctcgcgggttcttcatgagtaacgcagatgttatcgctcataaaatttgcgaagaaaacagccagccctggacgattcgccgtttgatgcaggtgttcgggactgatattgtttgtaaaatagatccgtctatctggacttcaattgcgcttcaaaaaatgttgaaatcctacgcggatcactttatcattaccgatgtgcgtcaaccgcatgaatataaatacctgagcaagttcgggactcgctttgtgttccttgaacgtgaaactggtattgaagataatcattcaacggagcaagggttgacacctggcttgagtgattatacaatcctaaataatggtacgttagacgatttgaaacgtaacgtgcttaatgtattcaatcttttaagagtgtaaacaatgactgaacaaaaccaaacccaacagcttcaaaacgatgtcctgatcctgaaagcccgtgtattcgacctgaacgaaatcattcagggtaaagaacaagaactggcaaatcaccgtcaactcgtaggccaaatttgcagtcttctggaaatcgacggttcgcagggtgtatcccctgatgccctggtcggcgcgatcaaagcacttctgccagcaacagcagaaaccgctggcgacgatgaagcgattgatgcatcaaaagcataattaacgcttaggcgtttaaccactgggggcgaaagcccctttttcatttggagtacacatgaaaagttttattgaagtagcgaaacccgtagttgatccggggatctatatgtgtgcgaagttcgatcaggcttcctgtgaagcgctcgcgaaggtgcaaaaacttctgggtgtagagaatcctgtttccgctgcaaagctgcatacaacgattgtgtatagccgtaagacggttgatctgttccctgcatccggtatctctgaacctgcccgactggttgacgtggagaagtgggaaacgaaatacggtaatacgatcgtgggtgttctggagtctgattatctccatagccgcttcaaagatgcaatggatgctggagcaacatacgattatgacgattacaaaccacatgtaaccctcgcgtatgattcccgcatcgaagatatcagcggagttaaaagactgttgacattgcccgtagatttgactatcatccaggaagatgctgaaccgctggatctggataagaaagtcgaagacatcacggagcacatcgaacatcgcggcgataagtgggttatactgaaccatgatcgcacgaaagaacttggtgaatatgattcgaaagaggcagcggaaaaacgtctgcgtcagatcgaatactttaaacataatgggtgatttatgaacagagcacgattgatgtattttatcaataacttacgcagagaagttaaccaaaatttcagtaaagcgttaagtgattggtatgtgacaaaggtttcaatgactacagatcacatcgcagaccgattcctggatcgttccgcgtcagtcaaaaaagactttgcgatctacagtgaaattcttaatagtctcgctaaacattattcgtgtaacgttctgtattacgcggtgaaagcgaaaaacgaaggtatgcaggaagtcattgcatatcgccggatcaatggcaaagtgtttgcctgtgcgttcaccgtccagatgttcgaaaacatggatgattcggttgctcacgaaaaaccagtgattgctgtacgattccgaaccgttatccctgagtacacgttgagcctgaacacgcgaaacgcgatccatgtgaactacatcgcacccaaaatcaagttcgagtatgacggctacagacgcgttatgtcacgcctggatcgcctgattgcttcaaaagattgtccgcctcaactacacatgttgaaaaatatttgaaaaaagcccttgcattcgtgcaggggcttttgttatattaggggtgtcgaaacaaaggaggcaatcatgaaactttactggctggtgttctcaaacgggtttgtaatgaaaggcactgttcactgtgcgaaaacttattgcaaatggaatgaatgctctttccgtatcctaagcgttgcatcttctcaacctgtaggggattactaatgactggtgataagtgggttgataaaactttgttgttgacagtaatctactttctggtaaaatacctggtgtagacaaaggagggagttatgagaaacttactgaatatcgcggaaatcttttgctatggtgtcgctgtgtatgtcctgtttaacggtgacggcgcgggatactggatcatgttcggtggtggcttgttcctctctttcatcaaaaaattttttaagtgagaaatatactatgcgctcaaatgtaccgaaaaacctgtataccgttattgatgctggttcgattcgtattgctgatgtaatggcactggtcgaacgcttcgatcgttcaacaacgctggggcaactgctgagtatggttaaatcccagtacccacacaaatgcccgaaatgcgagggtaaagggttcgaagtcaaacgtgttaacacgtatccttctggcttaccggattctggctgggttgatcagatggaagacttcaatgttacttgtgatatctgtaacgggcaaggcttcactaaagaacgccttatcgcaaaacctgtcaaagtggaatatgtacccgcatgaaaaacaaaatctatgctcatatgtctgagcacacaacggttcgtgttatcttggtagatgggccaatcgctcaagtagaaaccaacgataaacctttctcgttgcctttacaaaccagtgtcggtactttcgatgaagttatcgaagaattgacaaaacacgccattgtttatctgtgggaagcgcaaagttatccatacccaactcctacaagtccggcgtcagaagataacgtaaaaattcgttggggatatattgaatgaaaattaccgatctcgtaaaagcggctaatgcgctggtgacaagcgaacattacgccaactactgcgagcaataccctgttcccctggaacgcgcaattactcaatccggttatgacggtatcagtaccgtaaccgttgaaaacctgaaaacgttcatcgtgtttgctaacacgttctggatgtacttacccgataatatcggaattcgccagcctacattcttcacgctgtgtatgttctgcgaaacctatctcccagaatgcgaggattacgaagaacattatggggaataagatatcaatgggtaacaaagtatccctgatgcagtttgataaaaagctggggtttgcattctctcacggattcgccccagacgcggaaaccatgtttaaaatggcttttggcatcgatccggctaccctcgatcaagaggtgttgtcagacatcaacaaaactggtacgctgtattatgcccgtctgccaaatccagaaaacggcattcagtaccaatcgactctcgaaaaactcaaaactgaactgaaagaaataggtgaattatgacttctacagctattcaacaacaaaccattgatcatgatgctgaattcgcgcaactgatcaaagaacataacgcttttgcggcttctcgcgtcaatgaagaaagcgaacagacccgccgatccctctgggttgccatttaccgcgaagtgttcagcgagaaatccgctaacaaacacactcaggcagttgatgcagcagataaagcgctggcagcatacgatcgtaagttcggagcacagtaatggaacggtctgctggtattctcttcctgaataacggcagcgttttaatgggccacgcaaccgaaacgcctcattgggacatcccaaaggggcatatcgaaaaaggcgaagaacctattcacgctgcgatccgtgagtgcttcgaagaaactggagttcttgttgaaccgcacgaactggaaagcctcggaagactggattataccagtaaaaaagagatttacttattcgtgtataaaggcaataattaccccgaagccgataaatgcttctgtgcgtcaacgttcgtgaagaacgggcgaaccatcacagaaatggacggtttcaaatatgttccgtatagccagatccgcgatcatgcgcgtaagactatgggacatcttctatctaaacttgtgggatatacatcatgaaagcaacaacttttcaaatctgtcaaatgatccttctggctaccgcaacccgcgccgctgaacctatcgcgtatcagtcatggggtgattcattcaccgtgaaaaatattcgcgatctgcctggacgcctttacgcttcccctgatttcgaacccgtcgatccgaatgatttgacgctggaagaaatgaaaaatctgggcttccgtaagtggagcgacgattcaaacatgatgctgatccctctgtatctgttgccatacctgaaagacggtttccgcgctatcagtatcagcggtgaagaatttgaatttagcactggtgaatcagataacgatcatcgtatggggctgctgtctttcggggcattgcctaaatgagtcacgttgatttcaacaccttatctcaattggggctggtatggaaaatcaataaagatatcctgcatcccctggggctggcgttgacgcgtgatcctgaaactggcgtatcaatcggtgcgctggtttccgatgatggtgtctggtcgttcagcgaaaaatcagactttgaaaacatcgcaaagttgaataaactttatgctttacaggccgaaggaaagctgttagagttcttacaacaaaacgtgaaagagtgattatattatgaatggtgaacgtgtaattgtcattggcaagtcgaagcataaagctaacgcgaagggtgatcacttgatcatcaacaccgatcgcggtgactggtacggcgcaacgcaagtaacgagtggttatgcaaccatcgttgaaaaagatgcagttcgtcccgcaaccgctgctgatcctggttactatggaacccgcgaagagttcgaaagtgaaaaggatcaggagatcgcagaactgaaaaccaaagttcacaacgcgcgggtgtatgcggtgatttgccttaccgttgcggctatcaatactggtttgttgggttgggtggtgaatcatgtctaaagatgatattccggttcataaccgacttcgggaactccgaacttttcgtagtcgcgatcatgcgatcatggttgggagttatctcaactggtggaagcataatgatctggatctgaatccatcttatcagcgcccctacgtgtggacgcagaaagaacaagatgcgtttctgactaccttaatgacggggttcccttgtggtgtcatcgcgatcgcggttgatagccagttcaatgaaactcactgggtagaagtcatcgacggtaaacaacgcctgacgacgattatcaaattttacgaaggtgaaattggtcttcctatgccggacggttcccgtttattctggcatgaactaccccgacacgaacagcgaacctttgaaaatatgtcattacctgcactggggctggatgaatgcaccaaaaaggatcgtctggaattcttcatcaaactgaacttcgcgggtgtgcctcaatcacaagagcatatgaaccgcgtccttgaaatgtataaggctgcaaaatgaacaaagacgaagaactgaacattgattcagtagaaccaaatcagtttatcatcggtaaagaagatcatgaactgttacaagcggttaaaaacttgctgacgtatgctcatatccgcgtaccgaatggcgataacgcaaaactggaaatcgcatgtgctggttacggttacaccgctaccgctgataaaatcattagctattccgcatcaagaacccgtgaactggttcattaccgcgataaattgagtgaagaaatccatcaaactcaggtaattgtagatcagttgccaacaaatttcgaataacttgaaaaaagcccttgcagaaatgcaggggctttgttatattacacacatcgaaacgaaacagagaaaggaaaacatcatgaacatgaacaaaaacattgccgctgtagttggttgtgaagtttctaacgcagaacgttatgacaacggtttctctttctgtgttccgactgaactcgatgcgtacaaagccgcttacaaataccgcactatgccgatggtaaacgttacttacgcgccgaacatcgaaatgtggctggttcaggtttacaacaaagtatgaacttccacgaacgcaaggccgcacgaaccgattattacatgcggttcgtgtatggctggaaattacggaaatgtgttgcatgtaacggatcggggcgatatgatagcgaccgatctccgaaatgcagttcatgtaatggaaccggaaaagaacgctttaaacctgtgaggaatatattatgcaacatgtgaatctcaacccaaaaatggaaaagtatctgaatcgccttcatgacaaccaggcgcaaagggatcaggaacgcgcgatcaacattgaaacggctaaactccttacccagatgttccgtaagtttcctagcaaattcccatgcaattctatgcattcaagtaactgtatcagcgtagaactggctgataagcgttgtatcagggttaacctggcttacgggttatccgaagacggatataacctggtgatgggctggacatcaatgatcggtaacttcgttgaacagaacaatattgagttcaatatgatgcgctctgatttgttccagtgtccggtcgattcaatcaatatcggtagcctttacgctatccttcgcgcacaatatgatttgtggagtacaaaatgaaagtaacaagtgaaaaacttgaagaaattgaaaaatcagcccgttcgatttcttctatgatgggtagtaagtggactctcgttgaaaatttaagcatccagggaaatcaggaatatggtttcaggggcaaagagtataaacgcgcattctcatatggtgttccatatggcgacagccctacacagattaaaagctgggaagaggatctcggaaaatatctcgaaactgtagatccgcaaactattctggatctggttgatgacctgtcattggcgctgcgagataagcaaaaagcagaaaatgaagccgcgcactggaaagcaaatcacgaatgcgaagtatcccgcgcccgtgtcctcaaagagcgccctgatatgcctctggagcgcgtcaacgcatacaaccgtatggttgagttagaagaggaaaacaaagccttaaaacagcgtatagcgagcctggaggatgtcaatcaaacccgcatgatgttgcagatgattcagggtatggtgattgatacccaaaacatgaaccgcgaacaactgcgctactggcaaacacatttccgcaatcctaacgggtggtaatatgttcggacgaaaacgagaatgtaaacatgttgctaccggatggatgcggggaactccttacgcctggatgcatcattccgtaaccgatgggatcgggcgtatacatggcgatatgtatgcaacatgcgacaagtgcggggagaagtttttgatgtgtaagatacacgttgaccaacgcgatccgtgagctggcaaaacatccgatcacccgcgccgaaatccttcgaatcctcgaagaaacaaaatagcactttttgtttaaaaagccccttgcaaccgccaggggcttttgttatattacacacatcgaaacgaaacagacaaaaaggaaatcatcatgaaacttgttcgcgaagcaatcaaactgggtaacgaatacaacggcaaatggtacttcatcatttatgacgacaatgcagaaaaactggaaaaagttgaagatgcattacgtgcgatggaaactggtgcttctgttggtggtaaagtgatgacctgggaaaactactgcgacggttgcccttgctacaacgatggtttcggttctggtttctgggttgatgttgaagatgttccagcgttcaaagccgcatggaaaatcgctaagaaaatggcataattagcacgaattgctaaaactccataaccctgatctgttattgtacacacatcgaaacgaaggaggatatcatggaaatcatctacaaaagccggaactacaaaaaagaagatgttgcagcggtttacatcaagtaccggaacgtgaaatgtgagtacagcggggcatggggttatgaaatcgttgttgaagaagtcaacgccgacaacaaaaccatttgcagtttcaccactaataccgatagccctctgttcactactgaacagcttgaacaggcttatgaactgcgcaaccaggcttttaacgcggtacgtatcaaatgagattccgtccttatatcgaattccttcgcggtatcagtgagatcctgaaccgcgaaatcaaacccagtccgttagccgttgagctttaccgactggatgcaacccccgaagatgcagcgaaagattacggagatcagttataatgttaacttttgaagagtacaaagcacagcgtgatcagttaagcaactggtacagagagatcggcgcggagttaagcgcttaccctaaaaacgaaatgggtatgacgatcgaatcaatccgcaatacgccggaatacaaagcgaaacgtgctttgtgcaacaaggttttccaacagcttcgcacccttaacgggaagtacattaaactgtacaaaaaagaactggctgacgaacgtaaactgaaacggagtgtaaaatgatgcagcacgaaatcaaaacagagattgacaaacgtactttcctggaaaagaataaaacggtaacgctgatgcattactccaccaaaaacggttcgagtgagttctggcgcgttaacattgacagcaaagagaaacaccagtcgataccgttcgacaatgaaagccttgctcgcgctgtcttccaatcccatgttaaattttgagaattatattatgaaaactgtcgatatcgttaccagcatcaaagcgccgtccctgttcatctatcaacacggcaatatgcgcttcgctcgctcgaagttctacaactataatttcaacgttgatactggtgaattcgctcgctggggttcaacatattcccacgatccagaatacgcaccattccccgaaattctcgatatcgagatcactaccaaatgcaacgggccagcgggtaaactctgcgggttctgctacaagtccaataacccgaacgggttcaacatggatcttgccaacttcaaaaaaatcatcgacaaaatgccctggcttactcaatgcgcactcggtgctgatgcacaggggcaaacaaaccccgatatgttcgatatgatggcgtatgcgcgttctaaaggcattgtgccgaaccttaccattgctgacgtatcaaaagacgttgcagcgcgtttagcggcggttgctggggctgttgcggtatcggtttataaacacgctggttttgatgtcgctttcgactcagtagcgaacctgacagaagccggacaacagcaaatcaaccttcacttcatggttagctcgaaaacctatgatgacgcgtttaacgtggttgatgccgtgaagaatgatccgcgcctgaaacaagtaaacgcgatcgtgttcctgggactgaaacaaaaaggacgcggtaagaactgggacaccgttacccgcgaacaatataaaaaacttgttgaatattgcctcgattctggtgtaggatttggattcgatagctgttcagcccccgctttcgttgaagcgatggagggacacccgaacttcgaacagtacaagcaatacgccgaagactgtgaagcgacgatgtttagctcttacattaatgaacgtggtcagttcttcccttgctcgtttaccgaacgttgggttgaaggtggctgggaagaaggtctggatgttctggaagccgaagattttgtgaaggatatctgggaacacccgaaaacaaaacagttccgtaaagaactgacgggcaacaaggatcataacggttgccgtaactgtccggcttatgcggtatgtggtaaagatatgcgcgtacacaaagcccctgaaaccgatgtatatgcagtggagttgaaataatgttaatcgtatctcgtattaaatcatacgttcgtgatcgtgatattctggatgtgtcgcctatggttggtgaaactgttaccgtaagaaactatccggtgaatctggatcacgtaacctggatcgaagatgatgcaacaatcgttgttgaagggaagagacacccagcaatcacttttcacctgatctgttcaaccccgattacctgggctggatatgaaaacaaagaacagcgtgataacgctatccatgcgattgagcgtagaatgcagtttgcggagatcacattctgatgatttatcaatcccataatgattcaacgatgcgaatggttccggtatctattgacattccaacaaaaccgcgtacactggaatcgttgattgaaaaatactctggaatggttatttgtccttctaccgcacaggtggcaatggcagaacgcgatgaaattgtatttgaatgtgatacgaaaggttatcacaccgttgaagatatgcagatgattgaatatctctggggaatccgaaacgctgtagtacatcacatactgaccgctgaaaagaaagccgaagtcgtgagagaagttgaacagcgcgaagagatccgctataatcggatgtctgcacaggaaaaggatgaagcatatgaagtgtgccgccgtagttgatgaattaatgagcgcgtttaaaacgcgtcgtacagatgggcgtattaaagatccgaagtcaatcgcgatcatcgaacggtacgcgatgaagttaagcgaacaggaattcacgccaaaggcgctcaatagcctgatggttctgaaactgctgatcgcttcgggtgacgatatgccgcacgatgaaaacagtgctgaatcattccaaaaggcttatcgttcatggggagtgatttactcccgctcgctgggttcgtatgactccgttatgtggaacctgatgcacctggatcgcctgatctgggaagtgctcgaagaagagggtattgtatgaaaattcgggtagttgaagttcatacgcctggatgggttcctgaaagaacatacaagttagagaaacgagtatttgggtttttctgggttccgttgacttttaaatctggtattcatactatccaatacgatggaagaaccccagaagaagcgctggaattattcagactaagaacggaaaaacatttaaccgttgttaaggaaattgattatgaaactcgatcgtgaattaagcatggctatccgcactattgaaatgatgcttgataaactgagcgcaaaagaagagttttgtgtaagtgatatcgaagcggatttagttgaatggcgcggtgcgctttacgaagcgacaaagggcaacgatcccctcttcgatgaatatgacgtgtataacgtcaaggtctggaacactgaataccgtttcaagtggcctggtgacgcttacgggcatattcaaaccatttacgtaactggtggtatggtgtttgcaaccagtgttggggctagtgaacttccgatcaatcccaatagtaaagtaacgacaccgaacccattaggacatactaccgtttgtttgggtatggcggaggatttctccccgaactattcaggctggatcgaagccagcaaaactaaccttaaaagagtataaattatgtggaaaattgttgtgtgtattttgatggttgtcgttgttgtgttcttgcagtcaagctgtactgacgagaaagaggcacagcgtatcctggaagcacagggttatacgaacatccagttcacgggttacaagtggtttgcgtgttccgaaaaagacacatattcaaccggattcgaagcaactggtgtgaacggcaagcagatcaaaggatctgtgtgctctggaatgtttttcaaaaatagcacaattcgtttcgaataactgttgacactaatccccgttgtgataatatctctctcgtagacaacgaaacagataaacaaggggattaaaatgaacttactgaacgaaatgctggaaatggttgaagcgaacaaagaagcaatgaaagcgaaagaaggttgggtagttgttactgactgcttcaaaccgcaaagctggcttcctgtgttcctcaataaagacggtaacgaagaacacggcttctatgatgctgcaatcttcgaaaccgctgaacaggcttgtgatttctggtcttacctgagcggtgacaagcctttcaccaaatacggtgtttgccagtgcaaagacatttaatcccagccccgaaaggggcttttttgtaggtgaaatatgaccaaagcagaaagaattatcaaccatcttcaaaccggattcccgtaccagggagatttacagcgcgatatcatcgaactgttatcccagcatgacgggatggaagcggagataaaggaattgactcaccctgacgtgaacgtattcgcttcactgatggatgatgtgattgctatcgactcggacgaactgatctgcatcgagacaacgaacccagaagataagacgatcctgaaacaagcgtatgaacggatcgaagcattacacgatcgcctgttcacgttaactttcccaaataaaaacgatagaccttgttgacatcaaaacagattgtggtaatctgtatatgaaaactaattgtgaggaatacattatgaacgcttttgaaaaacgtgctgtcctgaaagatatcaaacctggcgcaatcctgtacgaagtaatcagtatcactggtgaaaaggcacagatgggtcgaaaacatatcatcactggcttcccgcgtgaacatcgtgggctggggctgtttgttaacggaatcactgtgtatgatgattgggaaaataaaggtcaattctctctggatgatcgtaacgtaactgggcgcaaccattataatttccatgcgttgttccgtagcgaagcagatgcgcaagcatatattgaacaaatcaataatgataaacttcctcctgatgacaaacaggagagtgttgaaatgacgattcgctggaaacgcgatcgcgcggaagatgcaatttggggttacatgtaaaacgttgcgcctcttaaaccgtaaataccctgtgtagcccatagggtattttcataaagaggtatgtatgtttaaatttagtcagaaaagcctgaacaacctgcaaggcgtgaagccggaactggttaaggtggtaaaacgtgctctggaactctcgcctgttgattttggtgtacgcgaaggtctgcgcaccgtagagcaacagcgcgagaacgtccgcaagggtgtttcccagaccatgaactcaaaacacatcactggtgatgctgtggatctgtatcctagcgttctccctgctggctggcagactaacccgaaagtgtggttgcctgtcctgaatgcagtgaaacaagccgctgatgaactgggtgtaaaactgcgctacggcatcaactggaagaacgatccgaaccttccgattgaaacgaaatttatcgacgcaccacacgttgaacttgcataaggcgacaatatgatttcacaattctatgttgacgctgtaaagcagtcacgtaacctgcaccttgcgcgaatcgttgatgggcgttgggggcaagaatgcggcggtgtgtctatcttcgaaactgcgctggatatgggtcggatgtcgggtaaaaccaaagcggctttcgatatcatcaagcagtctaaagggacactgaatatctacgttgcaccgacaaagcagatgggtatttgtgctgcggtagaacatggactggataagggcgctgattcgtctttcattctgtcgaaacgtcaagatctgacttccattttccgtggacaaacgatcaagtatcaggcaatcaacctgattttcgatgaatgtgacacgacgatcgacgaacggtttgaactggcaaaaacgctgaccttgtgtatgcgttcaagtcatcttcatccgttcccatatatccatattatccgtttgggtatgtaattgcagtgcgcggggtgcgaatccgcgtaccccgcaattaacaggaaaacttctatgaaatatgttctagataccaacgttttaatctcgaacccatattcaatcttctcattcgttgaggcgggtactgaaatcattatcacctctgcgacaatggaagaactggatcacctgaaaagtaaagagcgaaccgctcatgaagcacgattggcgatccgcctcctgtctaaagtaatcctggggcagaagtacgaagcaattacccaaacaggggtttcgttgaacctgacgaacccagcactgccggaaagcgtgaaactccgtatcgttgattatatcggtttagaagagttcccgcttgataaacaagatgcgcgaattatcgctacctgtatgcaggaaaacgcaaccctgatcacccgcgatattaacatgctgttgatcgcgatgtctaagggctgtcctgttgaacaatacacgggcgatgactcgctgaaagatagcgatgtgttgtattctggctatgtcgatatccctggattctgggatgatgtcgaggtgttaggatatgttggcgaagtagcccaaataagctattcctcgcttcctgacggcgattattacccgaaccaatacattctgtcggatggtgaactcgtagggcgtgtagtggctgctggagagtatcagcttgaactcttaccaatcaaacacgaatccgcgatgaagcgtaagctgatgaaaacaattcagcctcgcgatgcactgcaagcgtcattcattgatgcaattatggataaaaataccgatgtggtgaccatcatgggcgctgctggttcaggtaaaacaatgctggctgttgctggtgcaatgcacctggttaacgccggacactttgcaaacctgatgtatgttaaatcggatagtcctctgtcgggcgaaatcgggttcttacctggtactctgggcgaaaaactgcgtcctgctgtagaaccatgtattacgagcctgaacattctgtttaaggatcaaccggaagttgacaaatatgtagaagggctgctggagaaaaacgttgtccagttccctagcctgtattacttccgtgggcgctcaatcgggcatcctgatccgggtaaaggttcggttctgattgttgatgaatgtcaaaacttgagcaatcacgaaatcaaatccattatttcccgttgcggtgagaacacccttctgatactatgcgggaacattaaacagattgacaacccgcgcaacactgctgttaacaacggctttgtgtatgcggttgaaaaacttaaagagtacggtcattcaagtcatgtgatcctggataccgtatatcgtgggcgactggctgcattcgtcgaagagaacttttaattaagggggcttcggccccctttttcgtgaggtatacatgatcagcgttattgttagtccaaagctaattaccgtttgcgctaactgcaaaagtgggttagagtatgaactgtctgatgtacagaagagaaccgaagcgttttataatggtttcttccgtgctgctgattacatcgtgaaaaaacatatcgtctgcccgaaatgtggtagcgaagtgaaactattcttgtgaggttattatggtacaagttgtaagcattaccccaaaacaaactacctgtcgttgtggtgctgtcctgtcatacactgcacaggatgtcaaagaaaaggtatcaaccgattacactggcggtcgtgatgtgtatcgtgtgatccggtgtccggtctgtgataaggatgtagtagtatgaaacgcgaagaacgttatgcagtgtttaaatatgcggatattgatgccgcgttaagtgatagcgacaaactgcttctctctgcggtagtgaataaaattgatcgctatcgtaaagagcaaggcaaagaacccataaaaggggttgttgtcgagcatgattggcctgaatatgaacaggtctggaagatgatcgaaacccgtgttgaccgcgaagaaaacaatcgtaagtttgaaacgatgctggacaataaagaacgtctgggttatttcttcgtggttgagactcacacagggaaattcctgatcaccagtaacgcgcacagcacaagccgtctgaccaaatacagcggataccaataccgcgccttgttcagtcctaattgtggatttgatcacagcgaaatctttacgactagctggagcgtttactttaaacgggctgttatggtgtcgttcgatgaaatcgttgcactatacgatccgaacgtatcaatttcgaactataatcttgctgaattcatcgagaacaaactgagcgatgcgaaaaccatttaaaatggttgcataaataataagacgagggtatcatagccctctcttgttacaaataggtattacaatgaagaaaattatctttgctgccagcattttcttatgctctttttctggcaacgcggcgactgatccgttaggagagtttatccaaacactccccgctgtgaagtcaactttaccgctacaacaagcaacagtaatgaagaaagcgccagccaatgcccccagctatgttaaggaattggatgatattacaccaaagcagaaaaaggttttggagtacgctttcaggatcggaaatgagtacgatcgcaaaactgcaaagccagttgaatcggaaacatcgaaacgtttgggatatcatttagcggctattgcctggatcgagtctcgcgcatgtgagaacgtagggaaaggcaaaaagaatcatcatgcttatggttgttttcaagtaacagcccgtagcgcgtccgcacgaatggataaatcatattccaaacgcgtagtaatcaataagctcgaaacccttcggggtggttccaagtatgcacttcacgaactggaatactggcttgattaccacaaaggcgacttgaaaaaggcgctggcgagttacaacgcgggattcaagtattcaaagaaagaagcccgtgattacgctcgcatggttaaccataccgcgaagctgttagaagaaaaacgcattatctgataaaaagcccttgcaatttcgcaggggcttttttattatgtgtgtaccaactattgaggattaaattatgagcacatcacatcgagttattaccagtcacccgactatcatcaagccgaacatgctgcacatcattcagggtgtgttagatgaactgaacaaagatccaaaggttgaagtggaaaccatcacggtcgaccgtcatcgtatggaatcgttcagtatctacttcgcatatggagaagaaaaacgcaaactgtttatctgcgaaagtcaagatacgtatcttgacgttgatgataacacaattcatagcggcggtgtttacttcaacctgaacgtgtggggtagcaacaaagagatcatggatatcgtgaaagtgggtattcgtaagcacgtcccgaatgacgttagcatttacgaatgtgttaatgatgcaattgaagatcgctttgtgcgcgtaggggcttaacatggaaactaaactgacaccggaacagcagttagcaattattgatgaacgtatcgacgaaatccgagcgattgtaaaaccctatcaggaaaagctgaacgggttgctgaaagcccgtcaggaggtcaaagacgagatcgatcacaaaaccgcttcccgtgtccgagcgatgactccaaaacaacgtatggagttttacatcaattcaccgaacagcggacatgaaattttccgtgatgcgactaagttcttccaggatatggggcttgcgatcgacgggtataacccagaaaccaatcaacatattctccgtatcgcgatgaacgaggatcgcagtaacctcgaaacagtcctgaaatcgcttcaacgcgtgaagccatatgtgaagccgatcggcggtaaattgctgttcgatatcttcgaacatacatgttcacagttcagcacatattggctagcctttgatattgcggaagaacgctggatgtgtttcacgggttggaacctgaaacgcaatcaaaagccggaatttgaaagcgatagtttgcgatcagtgcttgcgtatatctgcgaaacccattattatacccctatcgaagaagattcatactaaggtaaaacgatgaaaaaacttgcgctgttactcactctgtttgctggctttgcacatgctgatgatcgactggctgaactctgcaataatcgtgacattaaagacgttgcggtatgtgaacaggtgattgccgaacaactggacgcggcttatgtgtggggtgaagaaaacgcgcacctcttcaagcgtcagaagttggttaaactgcatgagtttttacagtctgaaccaatgatgaacctctgtaccaatgcgccaaataaggaacgttgtgaaaaactccgtacttacctggttgatgaatatgttgctggcataggattatactgatgatgggattagtaatcttttacgggtgtgtgattgctgctgcaatcattatctggtattacgttaaaaagccaaacgaaagctcgttccctgtatatgatgacgagttggaagcgtggcaaagatgggacgatgaatttaaatgaacacaggttatatcttaatgtgtgttgtggttgtgatcgcggggctggctgtgctggcttaccgccactatacaggtgatgaaaatgattattaaagaaat

SEQ ID NO: 33 - DNA, 178888 bp, Unknown
  source: /note="Description of Unknown: KP2M-M0105 Bacteriophage sequence"
aatacccatctgctttgtcggtgcaacatagatattcagtgtccctttagactgcttgatgatatcgaaagccgctttggttttacccgacatccgacccatatccagcgcagtttcgaagatagacaccccgccgcattcttgcccccagcgcccatcaatgattcgcgccaggtgcaggttacgtgactgctttacagcgtcaacatagaattgtgaaatcatgttgtcgccttatgcaagttcaacgtgtggtgcgtcgataaatttcgtttcaatcggaaggtttggatcgttcttccagttgataccgtaacgcagttttacgccctgttcatcagcggcttgtttcactgcattcaggacaggcaaccacactttcgggttagtctgccagccagcagggagaacgctaggatacagatccacagcatcaccagtgatgtgttttgagttcatggtctgggaaacacccttgcggacgttttcgcgctgttgctctacggtgcgcagaccttcgcggacaccgaaatcaacaggcgagagttccagagcacgttttaccaccttaaccagttccggcttcacgccttgcaggttgttcaggcttttctgactaaatttaaacatacatacctctttatgaaaataccctatgggctacacagggtatttacggtttaagaggcgcaacgattaataatcatcgtaatagagataaccgaaacattcgtcaaattcacgtttacgtttcatctgttcttcttttcgctctttcatatcaggaggaagacggtcttcattgacttcatcaatgtaagcctgtgcatcctctttggtcaggaagaacgcatggaagttatatccgttgcgcccattcatactacgatcgtcaagagagaattctgtgtgacagtcccagtctttgtacagggtgatgcattttgcaaacagcccaataccgcgatgcatacgagggaagccagtaacaatcatcttgctacccatttccgctttttcgccgttcacgcagaacacttcatacatgatcgcaccaggtttcacatctttcttgagagcacgtttttcaaaagcacttttcataatgtattcctcacaattagttttcatatacagattaccacaatctgttttgatgtcaacaaggtctatcgtttttatttgggaaagttaacgtgaacaggcgatcgtgtaatccctcgatccgctcatacgcttgtttcaggatcgtcttatcttctgggttcgttgtctcgatgcagatcagttcgtccgagtcgatagcgatcacatcatccatcagtgaagcgaatacgttcacgtcagggtgagtcaattcctttatctccgcttccatcccgtcatgctgggataacagttcgatgatatcgcgctgtaaatctccctggtacgggaatccggtttgaagatggttgataattctttctgctttggtcatatttcacctacaaaaaagcccctttcggggctgggattaaatgtctttgcactggcaaacaccgtatttggtgaaaggcttgtcaccgctcaggtaagaccagaaatcgcaagcctgttcagcggtttcgaagattgcagcatcatagaagccgtgttcttcgttaccatctttattgaggaacacaggaagccagctttgcggtttgtagcagtcagtaacaactacccaaccttctttcgctttcattgcttctttgttcgcttcaaccatttccagcatttcgttcagtaagttcattttaatccccttgtttatctgttttgttgtctacgagagagatattatcacaacggggattagtgtcaacagttattcgaaacgaattgtgctatttttgaaaaatattccagagcacacagatcctttgatctgcttgccgttcacaccagttgcttcgaatccggttgagtatgtgtctttttcagaacatgcaaaccacttgtaacccgtgaactggatgttcgtataaccctgtgcttccagggtacgctgtgcctctttctcgtcagtacagcttgactgcaagaacacaacaacgacaaccatcaaaatacacacaacaattttccacataatttatactcttttaaggttagttttgctggcttcgatccagcctgaatagaacggggagaagtcctccgctacacccaaacaaacggtagtatgtccgaatgggttcggtgtcgttactttactatcgggattgatcggaagttcactagccccaacactggtcgcaaacaccataccaccagttacgtaaatggtttgaatatgcccgtaagcatcgccaggccacttgaaacggtattcagtgttccataccttgacgttgtacacatcatattcatcgaacagaggatcgttgccctttgtcgcttcgtaaagcgcaccacgccattcaactaaatccgcttcgatatcgcttacacaaaactcttcttccgcactcagtttatcaagtatcatttcaatagtacggatagccatacttaattcacgatcgagtttcataatcaatttccttaacaacggttaaattcttttcggttcttagcctgaataattccagcgcttcttctggggttcttccatcgtattggatagtatgaataccagatttaaaagtcaatggaacccagaaaaacccaaatactcgtttctctaacttgtatgttctttcaggaacccatccaggcgtatgaacttcaactacccgaattttcatacaataccctcttcttcgagcacttcccagatcaaacgatccaggtgcatcaggttccacataaccgagtcatacgaacccagcgagcgggagtaaatcactccccatgaacgataagccttttggaatgattcagcactgttttcatcgtgcggcatatcgtcacccgaagcgatcagcagtttcagaaccatcaggctattgagcgcctttggcgtgaattcctgttcgcttaacttcatcgcgtaccgttcgatgatcgcgattgacttcggatctttaatacgcccatctgtacgacgcgttttaaacgcgctcattaattcatcgactacggcggtacacttcatatgcttcatccttttcctgtgcagacatccgattataacggatctcttcgcgcagttcaacttctctcacggcttcggctttcttttcagcggtgagtatgtgatgtactacagcgtttcggatttcccagagatattcaatcatctgcatatcttcaacggtgtgatagcctttcgcatcacattcaaatacaatttcatcgcgttctgccattgccacctgtgcggtagaaggacaaataaccattccagagtatttttcaatcaacgattccagtgtacgcggttttgttggaatgtcaatagataccggaaccattcgcatcgttgaatcattatgggattgataaatcatcagaatgtgatctccgcaaactgcattctacgctcaatcgcatggatagcgttatcacgctgttctttgttttcatatccagcccaggtaatcggggttgaacagatcaggtgaaaagtgattgctgggtgtctcttcccttcaacaacgattgttgcatcatcttcgatccaggttacgtgatccagattcactggatagtttcttacggtaacagtttcaccaaccaaaggcgacacgtccagaatatcacgatcacgaacgtatgatttaatacgagatacgattaacattatttcaactccactgcatatacatcggtttcaggggctttgtgtacgcgcatatctttaccacataccgcataagccggacagttacggcaaccgttatgatccttgttgcccgtcagttctttacggaactgttttgttttcgggtgttcccagatatccttcacaaaatcttcggcttccagaacatccagaccttcttcccagccaccttcaacccaacgttcggtaaacgagcaagggaagaactgaccacgttcgttgatgtaagagctaaacatcgttgcttcacagtcttcggcgtattgcttgtactgttcgaagttcgggtgtccctccatcgcttcaacgaaagcgggggctgaacagctatcgaatccaaatcctacaccagaatcgaggcaatattcaacaagttttttatattgttcgcgggtaacggtgtcccagttcttaccgcgtcccttttgtttcagtcccaggaacacgatcgcgtttacttgtttcaggcgcggatcattcttcacggcatcaaccacgttaaacgcgtcatcataggttttcgagctaaccatgaaatgcaggttgatttgctgttgtccggcttctgtcaggttcgctaccgagtcgaaagcgacatcaaagccagcgtgtttataaaccgataccgcaacagccccagcaaccgccgctaaacgcgctgcaacgtcttttgatacatcagcaatggtaaggttcggcacaatgcctttagaacgcgcatacgccatcatatcgaacatatcagggtttgtttgcccctgtgcatcagcaccgagtgcgcattgagtcagccagggcattttgtcgatgatttttttgaagttggcaagatccatgttgaacccgttcgggttattggacttgtagcagaacccgcagagtttacccgctggcccgttgcatttggtagtgatctcgatatcgagaatttcggggaatggtgcgtattctggatcgtgggaatatgttgcaccccagcgagcgaattcaccagtatcaacgttgaaattatagttgtagaacttcgagcgagcgaagcgcatattgccgtgttgatagatgaacagggacggcgctttgatgctggtaacgatatcgacagatttcataatataattctcaaaatttaacgtgggattggaagacagcgcgagcaaggctttcattgtcgaacggtatcgactggtgtttctctttgctgtcaatgttaacgcgccagaactcactcgaaccgtttttggtggagtaatgcatcagcgttaccgttttattcttttccaggaaagtacgtttgtcaatctctgttttgagttcgtgttgcatcattttacactccgtttcagtttacgttcgtcagccagttcttttttgtaggttttgatgtacttcccgttaaggatgcgaagctgttggaaaactttgttacacaaagcacgtttcgctttgtattccggcgtattacggattgattcgatcgtcatacccatttcatttttagggtaagcgctcaattccctgccgatctctctgtgccagttgcttaactgatcacgctgtgctttgtactcttcaaaagttaacattataactgatctccgtaatctttcgctgcatcttcgggggttgcatccagtcggtaaagctcaacagctaacggactgggtttgatttcgcggttcaggatctcactgataccgcgaaggaactcgatataaggacggaatctcatttgatacgtaccgcgttaaaagcctggttgcgcagttcataagcctgttcaagctgttcagtagtgaacagagggctatcggtattagtggtgaaactgcaaatggttttgttgtcggcgttgacttcttcaacaacgatttcataaccccatgccccactgtactcacatttcacgttccggtacttgatgtaaactgctgcaacatcttcttttttgtagttccggcttttgtagatgatttccataatttcctccttcgtttcgatgtgtgtacaataacagatcagggttatggagttttagcaattcgtgctaattatgccattttcttagcgattttccatgcggctttgaacgctggaacatcttcaacatcaacccagaaaccagaaccgaaaccatcgttgtagcaagggcaaccgtcgcagtagttttcccaggtcatcactttaccaccaacagaagcaccagtttccatcgcacgtaatgcatcttcaactttttccagtttttctgcattgtcgtcataaatgatgaagtaccatttgccgttgtattcgttacccagtttgattgcttcgcgaacaagtttcatgatgatttcctttttgtctgtttcgtttcgatgtgtgtaatataacaaaagcccctggcggttgcaaggggctttttaaacaaaaagtgctattttgtttcttcgaggattcgaaggatttcggcgcgggtgattggatgttttgccagctcacggatcgcgtggtcaacgtgtatcttacacatcaaaaacttctccccgcacttgtcgcatgttgcatacatatcgccatgtatacgcccgatcccatcggttacggaatgatgcatccaggcgtaaggagttccccgcatccatccggtagcaacatgtttacattctcgttttcgtccgaacatattaccacccgttaggattgcggaaatgtgtttgccagtagcgcagttgttcgcggttcatgttttgggtatcaatcaccataccctgaatcatctgcaacatcatgcgggtttgattgacatcctccaggctcgctatacgctgttttaaggctttgttttcctcttctaactcaaccatacggttgtatgcgttgacgcgctccagaggcatatcagggcgctctttgaggacacgggcgcgggatacttcgcattcgtgatttgctttccagtgcgcggcttctgattctgctttttgcttgtctcgaagcgcgagtgacagatcgctaaccagatccagaaccgtttgcggatctacggtttccagatattttccgagaccctcttcccagcttttaatctgtgtagggctgtcgccatatggaacaccatatgagaacgcgcgtttatactctttgcccctgaaaccatattcctgatttccctggatgctcatattttcaacgagagtccacttactacccatcatagaagaaatcgaacgggctgatttttcaatttcttcaagtttttcacttgttactttcattttgtactccacaaatcatattgtgcgcgaaggatagcgtaaaggctaccgatattgattgaatcgaccggacactggaacaaatcagagcgcatcatattgaactcaatattgttctgttcaacgaagttgccaatcattgatgtccagcccatcaccaggttatatccgtcttcggataacccgtaagccaggttaaccctgatacaacgcttatcagccagttctacgctgatacagttacttgaatgcatagaattgcatgggaatttgctaggaaacttacggaacatctgggtaaggagtttagccgtttcaatgttgatcgcgcgttcctgatccctttgcgcctggttgtcatgacggcgattcagatacttttccatttttgggttgagattcacatgttgcataatatattcctcacaggtttaaagcgttcttttccggttccattacatgaactgcatttcggagatcggtcgctatcatatcgccccgatccgttacatgcaacacatttccgtaatttccagccatacacgaaccgcatgtaataatcggttcgtgcggccttgcgttcgtggaagttcatactttgttgtaaacctgaaccagccacatttcgatgttcggcgcgtaagtaacgtttaccatcggcatagtgcggtatttgtaagcggctttgtacgcatcgagttcagtcggaacacagaaagagaaaccgttgtcataacgttctgcgttagaaacttcacaaccaactacagcggcaatgtttttgttcatgttcatgatgttttcctttctctgtttcgtttcgatgtgtgtaatataacaaagcccctgcattactgcaagggcttttttcactttaatcgaatttttctggcaactgatctacaattacctgagtttgatggatttcttcactcaatttatcgcggtaatgaaccagttcacgggttctggatgctgaatagctaatgattttatcagcggtagcggtgtaaccgtaaccagcacacgcgatttccagttttgcgttatcgccattcggtacgcggatatgagcatacgtcagcaagtttttaaccgcttgtaacagttcatgatcttctttaccgatgataaactgatttggttctactgaatcaatgttcagttcttcgtctttgttcattttgcagccttatacatttcaaggacgcggttcatatgctcttgtgattgaggcacacccgcgaagttcagtttgatgaagaattccagacgatcctttttggtgcattcatccagccccagtgcaggtaatgacatattttcaaaggttcgctgttcgtgtcggggtagttcatgccagaataaacgggaaccgtccggcataggaagaccaatttcaccttcgtaaaatttgataatcgtcgtcaggcgttgtttaccgtcgatgacttctacccagtgagtttcattgaactggctatcaaccgcgatcgcgatgacaccacaagggaaccccgtcattaaggtagtcagaaacgcatcttgttctttctgcgtccacacgtaggggcgctgataagatggattcagatccagatcattatgcttccaccagttgagataacttccaaccatgatcgcatgatcgcgactacgaaaagttcggagttcccgaagtcggttatgaaccggaatatcatctttagacatgattcaccacccaacccagcaaaccagtattgatagccgcaacggtaaggcaaatcaccgcatacacccgcgcgttgtgaactttggttttcagttctgcgatctcctgatccttttcactttcgaactcttcgcgggttccatagtaaccaggatcagcagcggttgcgggacgaactgcatctttttcaacgatggttgcataaccactcgttactttcgttgcaccgtaccagtcaccgcgatcggtgttgatgatcaagtgatcacccttcgcgttagctttatgcttcgacttgccaatgacaattacacgttcaccattcataatataatcactctttcacgttttgttgtaagaactctaacagctttccttcggcctgtaaagcataaagtttattcagctttgctatgttctcaaagtctgatttttcgctgaacgaccagacaccatcatcggaaaccagcgcaccaaccgatacgccagtttcaggatcacgcgtcaacgccagccccaggggatgtaggatatctttattgattttccagatcaaccccaattgagataaggtgttgaaatcaacgtgactcattaggcagtgctccgaacgaaagcagccccatacgatgatcgttatctgattcaccagcgcggaattcgaatttcttgccgctgatactgatagcgctgaaaccgtctttcaggtatggcaacagatacagagggatcagcatcatctttgaatcgtcttcccacttacggaagcccagatttttcatttcttccagcgtcaaatcattcggatcgacgggttcgaaatcaggggaagcgtaaaggcgtccaggcagatcgcgaatatttttcacggtgaatgaatcaccccatgactgatacgcgataggttcagcggcgcgggttgcggtagccagaaggatcatttgacagatttgaaaagttgttgctttcatgatgtatatcccacaagtttagatagaagttgtcccatagtcttacgcgcatgatcgcggatctggctatacggaacatatttgaaaccgtccatttctgtgatggttcgcccgttcttcacgaacgttgacgcacagaagcatttatcggcttcggggtaattattgcctttatacacgaataagtaaagctcttttttactggtataatccagtcttccgaggctttccagttcgtgcggttcaacaagaactccggtttcttcgaagcactcacggatcgcagcgtgaataggttcttcgcctttttcgatatgcccctttgggatgtcccaatgaggcgtttcggtcgcgtggcccattaaaacgctgccgttattcaggaagagaataccagcagaccgttccattactgtgctccgaacttacgatcgtatgctgccagcgctttatctgctgcatcaactgcctgagtgtgtttgttagcggatttctcgctgaacacttcgcggtaaatggcaacccagagggatcggcgggtctgttcgctttcttcattgacgcgagaagccgcaaaagcgttatgttctttgatcagttgtgcgaattcagcatcatgatcaatggtttgttgttgaatagctgtagaagtcataattcacctatttctttcagttcagttttgagtttttcgagagtcgattggtactgaatgccgttttctggatttggcagacgggcataatacagcgtaccagttttgttgatgtctgacaacacctcttgatcgagggtagccggatcgatgccaaaagccattttaaacatggtttccgcgtctggggcgaatccgtgagagaatgcaaaccccagctttttatcaaactgcatcagggatactttgttacccattgatatcttattccccataatgttcttcgtagtcatcgcattcagggagataagtttcgcagaacatacacagcgtgaagaaagtaggctggcgaattccgacattatcgggtaagtacatccagaacgtgttcgcaaacacgatgaacgttttcaggttttcaacggttacggtactgataccgtcataaccggattgagtaattgcgcgttccaggggaacagggtattgctcgcagtagttggcgtaatgttcgcttgtcaccagcgcattagccgcttttacgagatcggtaattttcattcaatatatccccaacgaatttttacgttatcttctgacgccggacttgtaggagttgggtatggataactttgcgcttcccacagataaacaatggcgtgttttgtcaattcttcgataacttcatcgaaagtaccgacactggtttgtaaaggcaacgagaaaggtttatcgttggtttctacttgagcgattggcccatctaccaagataacacgaaccgttgtgtgctcagacatatgagcatagattttgtttttcatgcgggtacatattccactttgacaggttttgcgataaggcgttctttggtgaagccttgcccgttacagatatcacaggtaacgttgaaatcttccatctgatcaacccagccagaatccggcaagccagaaggatacgtgttgacacgcacaacttcgaaccctttaccctcgcatttcgggcatttgtgcgggtactgggatttaaccatactcagcagttgccccagcgtcgttgaacgatcgaagcgttcgactagtgccattacatcagcaatacgaatcgaaccagcgtcaataacggtatacaggtttttcggtacatttgagcgcatagtatatttctcacttaaaaaattttttgatgaaagagaggaacaatccaccaccgaacatgatccagtatcccgcgccgtcaccgttaaacaggacatacacagcgacaccatagcaaaagatttccgcgatattcagtaagtttctcataactccctcctttgtctacaccaggtattttaccagaaagtagattactgtcaacaacaaagttttatcaacccacttatcaccagtcattagtaatcccctacaggttgagaagatgcaacgctcaggatacggaaagagcattcattccatttgcaataagttttcgcacagtgaacagtgcctttcattacaaacccgtttgagaacaccagccagtaaagtttcatgattgtctcctttgtttcgacacccctaatataacaaaagcccctgcacgaatgcaagggcttttttcaaatatttttcaacatatgcagttgaggaggacaatcttttgaagcaatcaggcgatccaggcgtgacataacgcgtctgtagccgtcatactcgaacttgattttgggtgcgatgtagttcacatggatcgcgtttcgcgtgttcaggctcaacgtgtactcagggataacggttcggaatcgtacagcaatcactggtttttcgtgagcaaccgaatcatccatgttttcgaacatctggacggtgaacgcacaggcaaacactttgccattgatccggcgatatgcaatgacttcctgcataccttcgtttttcgctttcaccgcgtaatacagaacgttacacgaataatgtttagcgagactattaagaatttcactgtagaccgcaaagtcttttttgactgacgcggaacgatccaggaatcggtctgcgatgtgatctgtagtcattgaaacctttgtcacataccaatcacttaacgctttactgaaattttggttaacttctctgcgtaagttattgataacatacatcaatcgtgctctgttcataaatcacccattatgtttaaagtattcgatttgacgcagacgtttttccgctgcctctttcgaatcatattcaccaagttctttcgtgcgatcatggttcagtataacccacttatcgccgcgatgttcgatgtgctccgtgatgtcttcgactttcttatccagatccagcggttcagcatcttcctggatgatagtcaaatctacgggcaatgtcaacagtcttttaactccgctgatatcttcgatgcgggaatcatacgcgagggttacatgtggtttgtaatcgtcataatcgtatgttgctccagcatccattgcatctttgaagcggctatggagataatcagactccagaacgcccacgatcgtattaccgtatttcgtttcccacttctccacgtcaaccagtcggacaggttcagagataccggatgcagggaacagatcaaccgtcttacggctatacacaatcgttgtatgcagctttgcagcggaaacaggattctctacacccagaagtttttgcaccttcgcgagcgcttcacaggaagcctgatcgaacttcgcacacatatagatccccggatcaactacgggtttcgctacttcaataaaacttttcatgtgtactccaaatgaaaagggggctttcgccccccagtggttaaacgcctaagcgttaattatgcttttgatgcatcaatcgcttcatcgtcgccagcggtttctgctgttgctggcagaagtgctttgatcgcgccgaccagggcatcaggggatacaccctgcgaaccgtcgatttccagaagactgcaaatttggcctacgagttgacggtgatttgccagttcttgttctttaccctgaatgatttcgttcaggtcgaatacacgggctttcaggatcaggacatcgttttgaagctgttgggtttggttttgttcagtcattgtttacactcttaaaagattgaatacattaagcacgttacgtttcaaatcgtctaacgtaccattatttaggattgtataatcactcaagccaggtgtcaacccttgctccgttgaatgattatcttcaataccagtttcacgttcaaggaacacaaagcgagtcccgaacttgctcaggtatttatattcgtgcggttgacgcacatcggtaatgataaagtgatccgcgtaggatttcaacattttttgaatagcaattgaagtccatatagacggatctattttacaaacaatatcagtcccgaacacctgcatcaaacggcgaatcgtccagggctggctgttttcttcgcaaattttatgagcgataacatctgcgttactcatgaagaacccgcgagaacttaattttttgataccgctagaaaacagcgcgtatgcatcgttattggacatcaccagcggggcttcacgatcaccctcatagaatgggttcttcgctgccagcgctcgcaattgcgtgttatcgtgatgttccatagaacgtttcaggatagctttgatttcgtcggctaacgcgataacttcaacattacggaagttatgcacaaccatttgagcaacggtatctttacccgttcgctttttaccacaaataccataaatcatttttgcgttttccgtggagtaggcacgatcacccgtccgtcgatctcaatttccatgtgagcgaagttgaacatcgtcatacaggatacggcttcatccgaatcattggtatacataagctcaagctctccgaggttggagggccaagcgccatagaagcgaaatgtcgctacagtttttgactgcgagttatccaggatatgcaaagccattgcctgttgtggttcactccaacgcacggaatcgaaggtgttaaaatcgacagtaccgagcatccaaaggtaaaccccaagatacgatcgcagttcttcatcaacagcaaaacgaatagtcagtggatcgaactccattgcagatcctgggatcttccctcgaatcattgggttcagtgggacatccgtaattggaatgttgatagcaggtagtgtaacaccctgaacctgtagtttcaacccttttacataatcattgtcaggaatatctaacatgaagttagtaggtgaaatctggttcaggatcatagcagttgtattcatgatgatctccattttatagatatttagatcaagaccgtgagcgaagcgaacacacgaacgaagtgagtgttatgtacgatgtactgtttataatatttatattttatatatagagaaaacagtacatttccgtatactttttatacaatcgttaactatccgtcttcgcttcgcttgacggaactcgcttcgctcgcgatctaatttttagttgatctattcaataaataggtatactatacctatactttcaaaagagattgaaaacatgaaatcattcaaagaactactttctgaatctgttcagaacaaaaaatttgctaagaccgttgatctggttgaccgtggtaacgctgcaaaaggtcagattggtttcctgcattttgcacatggtgctgattacgatgtgtatgcgccggactcccacgatctcgcttacttcggtaaaggtgttgtccgcctgaaaggtaaaaccactggcaagactcaggcagcgtatattgactgggcgaaaggtactgtttcattctacagcggtgatcctgctgatgacctgaaattcgacaagccactgaaattcaaaggcgcttctctgtacaaagaagcagaagaaaacctggatctgtataatcagttggcggaagatttcgaaattgatctgcctctggatgaagcattggtgaaaggaaaggtgtacaagctcccaagtaacgatatgtgcttgctgtataccggacgtaccaaaaccaaagaaacaggtgaatacgccgtgtttacggttgtagatgcctctggtaaacctcgtctggtatcgggtaaacgctttacccaggaatacaaaggtgatgttctgtctaaactggttctagctgaatcagaagatttgaacgaagccgctaaagatattcgcgaaaaagttattgcggtgttggtgaaacgtgggtttaacgaaaaagacgcagaaaagatggttgataaaaacctgaaagatgcgatgaaggttcgacctggcgcaacccctggaaaactcgcggaaatcgtgagtaccctgtaaaaataaagccccttcctttcggttggggctttttgttaatatctgttccaaactttcttcgcgctgtatggttttcctttggactggaaagcctgtgtaggcaaccaaactgctttcgcccaatcttttggggcgatctctgcaagtggtgaacgtagatgggctggcaggtaggctttgatcatttgatcagccccgcgcattcccttcacgttgttccaattgattttcagtctggttttgttagaaagtcgatctgttgatccgtagccacgtttcaggagttcttctaaaaactcttgacgtgctcgcggtggcgcatagtgcaagttcagcccgtacagaaccaagttacccgctttcgaacgtcctgaacccaggaaaatgatcagcgggaaccgatcccagtatggaagggtgtctttgtatttcgcatcgtagatgaacgtatacaagcgacccgttgctggtttcgcaaccctgtgcgtcttaatgctggttttgatgaaatcaccaaaccaatcggtcgaatctttctgacgtttcgcagcggttacaccaacagtcattttcttcaaactgttgcggaaatcgtttacgatatcaaccgcgtgttttttacgatagtcattacgtttgcgtcgggcttcggtttctgctttacggcgttcgatttcatcatcaatctgctgcttatagcggtgcatagactttgtgaacgttgcgtatgcaatcccgttttcgtccgcgaactttttggctgtcatgccttttaattttgcgcgtcggaatttgataccaagttcaacccattcacccagctttcgcttcggtggtggttttggcttgtcttcttctgcgatgatctcgaactcaaaaataaaactcataattccctccgtttagggtatttattgccctttccatccgaacacacgtttcaacgtgtcctctgtgatgatcttgaactcccagcccttttgttttgctgctgcattcgcggctttccatttgtcaatgtttaccgcataagtatacagcgcatcaacaaatttctttttgttgtgaacgttgttgttcgctggcttcggtgggggcaacgtttctttcatcggcttgacttcccaaaggtaggtcacaccgttatccatttcaacatagaaatccatgaaatagcgccgtcgctttccgtctgcgttgctgaaataagggatcacaacctcttcactgttccagcgtttcacatgcgggtttctatcaagccagttcataatatatttttcccagcttgaacgatacgttatctttcgcggatctcccttatatttctgtatgttctggggcataaaagaccccttgtatgtctgtcttccagccattttagatcctaaatatagtaaacattagataggggaaattacaatgttattttcgttctttccaccagttgattacaaaggcacaccaactactgatatctaccgcgattatcgtttttactttaaccgcgtgatcaggaattataagccgcgtacatatcaactgacaggttcattaagacccgaacaattagcggaaacgctatacggaaaccagcaatactactgggttatcctgatgcttaacgataattacgatccgttttacggatggattaccgatcaggaaacggcttatcaatgcgctatccagcgttattcaaaagcaggtggtgaacaggttctttatcatatggatggtaagggcaaccgttattacaatttggttgaagacccgaacaatcccggtcattggtatgacaaaggcgataagaacatgcgttatttgcagtaccagggaacattagtccctgtagatatttatgaagatgcggtgcttcaaaatgaagcaaaacgaaccatcaagattattaacccctctgatattcaatcgtttgtaagtgattatatcaaggaaatggaaaaggcaaacctatgaaatacggtggaaataaatactcccctttctttgagggggtggtcgaagaagtcgatgatcctcgtctattggggcgtgttcaggtgcgtgtattcggtgagcatccggcacagaaacaaaaatctgaaactatcggtattccggttgaggaattgccgtggatgatgcctattcaggatattcgcagcgccgctatttctggtgttggtttttccccgactggtatcacgcgcggtagttttgttatcggttactggcgcgataaatggcaccaggacggcgttatactgggaacctttgcgggtgagtaccgagagaagccggacacccagaaaggcttctgtgacccgtttggcgagtatcctcgttatgtaggtaacgatgtcaacgtactggctcgtggtggcgcagaggggcgcggttcttcgagcgtgattattcgtgatgctaacagttcgttagctgtcaatccagatgatcgcccacttgacgagatcccagaagataaccgtcctgatactggcgggttcactatcgaaaccatgcttaaacaggatgaaggtatccgcacaaaatggtatattgatagtgaaggttatccgactatcgggatcgggcatttgcttatcatggaaaaaacccgtgatactgcgaagattaacgccgcgatcagtaaagcagttggtcgagaagtaaccaatggaacgatcacagcagaagaagtttcaacgctgtttgctcaggatttggcaaaagtccggcaggggatcagcaacacttcaaacgttcgagaagtatacgtgacgttaaaccgtcctcgtcaaatggcaatcgaaaacatgtgcttccagatgggtgttggtggtgttgccaaatttactaatgctctggctgctatgaagcgtcaggactggcaaaccgcttacaacgaactgcgaaactcaacatgggctaaccagacaccaggacgttcttcacgagtatctaaaatcgtgctgacgggcaacctcgaatcatacggtgttcaggttccagatccagaagggcgttcattgagtgctgcatacaatgctgttgtgttggctgcatcaaatccagaagatccttttgttcctggtgatactcgcgtaatgttcgaggaacctaaatccgcatacgctgctgaatatccatacaacatggtattcgaatcccgttctggacacattcaggaattcgacgatacaccaggctttgaacgttacaaccgtgttcacccagcaggatcatacgaagaaattcgccctgatggaacccgtgttgttaaaatcgttggtgatgattatcaaatcgtcatgcaaggccgtaaattaaacgttaagggtaatttacaggttgttatcgagggtgatgcgttcatttacaatatgggtaacgttcaacagaccgttgatggtaacgtgaccgagttcgttcgcggtaatgtaaatcaaaccgttgaaggtgaatatttggggctgattaaaggcaacgcagaattaaccgttgaaaaagatgcaaccgtaaacgttaatcagaatttaatggctaacgttaaacagaatgcaactgttgccgtaacagaagatgcaacaattaccgcaaaaaatgctctgattgatattgagcaagatttggatattggcgcacgtaatatcaacatgcgagcatcgaataatactttcattgattccggcgcactgactaagatcactggcggtactgtacaggtaggctaaacatgatcatggattatgaaaccatcattgatgggattatgcaaaattttcagcatccttgcgatgctgagatccccgctggatattacagacgcgttatctggcagggacacacagaaaattaccctgctgttggggtagaatgggcgaccgaaatcatcccgatcggaactcacctgtatacgagttcccctttcggacagaaaagcgatccgcttccggtggtgaactctccaaacgtacccacgaatccagacggaaccccaggggtttctactgacattctggttacgaagattggttattatttcgccagtcaagcggatattgatgcctatatcgcatctatcggggctactaagctcgcgggtaatgactggtacggggcggatctatcaaaagcgaatctgttcaagaaccctggcgaactcgcgatgtacaaggtggaaaactccggtggttacttgctgacttccggtccccgttgcgatccgcgaatccgacaggtatacaaccagactacaggcgcgtttaccagcattgattactactggaatggtaatcgtattgcgtacatgaaacacgacgaatcccccgcgcaccagtgcaaatatacagggatgtcagtaaacacgaacgcagataccagcattcctccggttccccctgctctcccgtcaacgtatggggcgctaccgagtgaagccagattgttttctgctcgctctggattgggctgtattccggcgaccgtagggttcccgtatacgaatatcagcgatgctatgctttccgcgtggaacgagactcgtaaaacgttcaagctggctttcgatatgctgacgggtacgattaaaaacggctctggtatcgcgacgatgtttgacgggctttcgatcgggatggaagaaatcacagcgggtgctctggcattgtcacagcaagcatggcaaaccgcaatgaaggtgttccggcagatcattagctctgcgtttaacatcgtgggtggggcatggagtctgatcaataacttcctcccgactgttgcgatcctgggtgttgcaatcaacatttacgatctggtgtttggtgatagttcggttcaatccctgaaagattctttccaggctctgattgactccggcgcacagacgtatgaaagcgtcataaacgcaatctacggggctataggcagttcttacaactacaccgttgaatatgtcaaggctggcgctcgcgaccttgtagacgcttgtagcgcgttatttgactggtgtttgactatgttccaaaacggttgcgttgctctggtggatttgtacgggcgtatgatgcagatctggtcaatgcctcccgaaacaccaaacccgctttggtctgctgtgctggctatccgtaacatcatgcgacagattaaacctcttgatgtgattctgggcggtaacttcccagggtttacagcaatggatctgtatcagcaagcacaagcgaaagtgaaagcgttcattgatgcatcctatgcgcagatctccgcactgtatgatcaggggcaagaactattcaacaccctgaaagcacagacacaggaaagggattcgattaaacgcaagttcgatcagtacctaaactggatgtgggaacctgtaacggaagcaacaaccgctgcttatcaggctgcacttgatgccgctaacgctgctgtgaatgcgactaaggccgcatatgagggaatcaaagcacagattgctactctgcaagatgggatgaaagacacctacagcatggcaatggctgaactcaaaaaactgcctgtaatggctcagattaaccagttcttaggttactgtggggttgcattcgatgacctgttaaaaacgtatgagaacgcgctgacgggcgcacaatcgctatataaaaactttgttgacagttcccgctcgtttaaggacacatgcaaggtgatttataaccagatttgtacgcttgctctaagtaaggtaactcaatacgtaaacaaattactgtcattaatcggactcgcgatcacattcggttcaattagtgtttgcgtccctatggttcaatactaaatacccgataacgaggggtaataatggctactacaaagaaacaaattaatcagatccccgatatctttgtcggggctacttttgacgaaatcaaatctgacttaataaactggctccgaggtcaggacgaattcaaggattatgatttctccggctcgcgcatgaacgtacttgtggatctgttatcatactgtacactgtacattcagcaaatgagtaacaccgcactgttcgaatcgtttattcgtaccgctgcattgcgtagttctgttgttcaacaggctcaggatttgggctatatgccggactcccgcaccgctgcaaatacttcgatcctgatcactgcgaaaaacccactgaacccaacatcgatccgtattccacgcggtacgaaattcatcggtacagtgaaagaaacaaacagtttcccgttcgtcgtatccgatgacgtggtgatcgttcgtgacaaaaacaataactatgtttcgatgttgaacatcgttcaggggcgtttagtacgtaccgaagtcatctttgatggttcgactatcctgatccgcgatccaaacatcgaccgtagccaggttcgcgttaccgtcaacggcgcacaatgggatgactggacaaacgaaagtatcgtaaacgcaacgggtgcatcaactgttttttatatgcgtgaaactgttgatggacataccgaagtttactttggtgaaggtgaaaccagccaacaggtcgcgggtggtgctctgactgctgattacatcgggggcttgaaacctgcaaacggttcaaccgttgttattgaatatatttcaaccaacggcgaagaagcaaacggtgctgaaaactttgtttacgtggatacgttgacaaacattagcattacgagtattgttgagaacccgactaattcagcggactatgtaggcgctgatggtggtggtgaaccggaagatatcgaacgtattcgcgaactcgcgcctatcatgcgtgagacacaacgccgttgtgttactgcatcggattatgaatcgttcttgtctcaccgtttcggttctgttattcaggcggttcagtgctttactgataaagaaaaacctggctatgcgttcatcgcggttaaaccgaaatcagggttgcgtttgacctctgttcaaaaagaggatatgcaaaactatctggcgaagtataaccttgcgacgattacgccgtcgatccttgacccgaactatctgtacatcgtacaaagtatcaaagtaacgtatgatatcagtaagttggttgaatcagaggaatggttgcgtggtcaagtaatcaatgaggttgacagatattatactgataacgttgaaattttcaacaaatcattcagtaagtccaaaatgttaacctatgttgataacgcggacgtgtcgatcattggttcttctgcgactattcagctattgcgtgaacttgataactattacagcgctccgatgtctggtattcacttcttaaaccaggtgaaatcacgttctgttgtttcgaacgggttcaaatacacaaacgctgctggtgattcgtatgatgtgcgttatgcatcaaccgatatgaacaccacaaccggacgtgcaaaaattgttatcgggccattcaaaaacggtgatatcagtatcgcagcctatacaggaaccgattttgataaatatcctggagtgaccgatcgtaataaatattacgaagtcggctatgtggaacactacactgatttcattagtttcgatctgggtgtcctgaacgttccatccgagcgattcagcgctgcttatatcgaactgactggtacaccattggaagagaacattttcacccgtgatggttctctgattgtgtttgaaaacgatctccgtcctcaatatacaacattgacaatgaatccaatcagtcaataattttaacccctgtcatccggcaggggttttttgtttgctaaatatgggatataagtaacgcaaatttggagaaacataatgattaaagcgccgtcaattaccagtttgcgcgttgataaactggctgctaacttcgtttatttgaagtgggatagcgtcggcatggatttttactatgtcgtggaaatggcagaaactcgcggggcaggtggtgttactattccagatgaagatttaacctggttccagttgggttacgcttttttgaatgaatggttttcttccgatgtccaaccaaacaatttttataaattccgcgtcatggttacgcacaagggctttgaaccgtctgattgggtttatacagatgaattatggacgttcagccttaacgcctacgcatattcaacaatgcgtgaatttacgccaagtgatgcattcataaacgaaaaattcgcaaagaacaatcagaactacgttaacttcaatacagatgtggtaatggcagcgttgatgaaagaagactttgtgttttctccactttacactgacgtatcccagatcagcgataaaattcttacacaagaaaactatcacgaaatccaggatcatattgaacacgtttgtaatgacattaacagaactttcctggtagcgtcaaacggtttattgtacctgtttgaacgttttcagaacatggcgaaggtgtcaaacgacaaagggcagacatggcattactacaaagcatttaacgaccgcgtaggaaaccctgtatcgcgctctattgcgtaccaaagccgaaacacaacctatgtactgggttacgatcgtatcttctacgggcgcacctcaacggatattcgctggtctgcggacgatgtgcgattctctgctgatgatgttacgtttgccaaactggggaaccagactggccttgatttcgacgtagactcatacaacacgtttgctaaactgcctggtaacgtgtcgaaatatgcagaagcaatggcatgttccgatgactggctttatgtggttgcgaaaaacgttgtgcgtcgtatcgcgctgaaacagacaccgatcgacaccgatccgagttctccaacgttcggagaaaagattttcgatacagcaagctatacagttgtccctggaaatgataagatcgttgtcaagaaaatggatgtgatgaacgggattctttatgcactcgttacgggtgaagtgaaaaccgctctgcaagatcctacaaaacccgctaacgtggttccgtccgctgctgctggtgtgtatcaatggcaagaagacacgaaaacctttgtgcgcctgtacgggaacaccgaggaagaacgtttttatatccagcatgaatacaccaatatgtcaacgaacggcacggagatttttatttccgtagcgaactacaaatatccaggcacacttcccgatcctgaattgttgatcgagaaccctgcactggttggtgctgtaaaatatgatttgcgtcctggctatactgccagccttgcgattaactttgcgacgattcgcgctcatatcgacgacccgactgtttggaaatttggtgcgcaggaatattacaacgaggcgaattatagctggttcttccgcgactctgtgcgcacatggatcactaatgataaccgtcctctggtggtgtatccgaaaatcacctacagccttgtaaccgatagtgctggtccttcgtcatcgcttcgtgtgaacaaagaggtatgggatcgcggacatgttacgatttacattaacaacattaagtttaccggattcacaaagtatacgaacggcgtgttgctgtataagagttcaggcgaaatcatcgggttctttgaactgagttaccgcgctcgcgataacttaacgattttctggaaaccagacaatacgttattgattgccgatcttattcagcaggaacgcgaaaaaccgtatcaaccggatctgtcacctggtttgattgacccagatttaagccatatgattacgcgctttgcgcctcaaagctatctggaacagcagtatttcgagaagttcggggaatactatttgcagttcgtttcgctgggtgaaaacacctactataacaagctgctgaacctgatcaggaacaaatatccgcgtgagaagaacagcgtagaatatctgtggtcggaagtaaaccgccgtaatatctacctggataaaacgaagcgtgatcaggtggttcgtttctttgaatctcgttgtagtgatttctattcaacgaaaggcatcgaagcaagctataaattcctgttcaaactgttgtataacgaagatgtaagtgtagaaatcgaaagttcgaacactctggaatatgatattctggttcattcaacaaatatcaaccaggacattgtaggccggacgatttacacaccaacagcgagagcaaacgtgacgtatatcgaacgccagtatgatgacggtcaattacgttggtcggtaacgctgcacaacgtgatcggtaacttccttgaagggcaggttgtcaagtctgaaaagactaacttcacaggtactattctgcgtggtgtgcgtggtaagcaaatggcgaacaactcgatcgactacttcaaccgtgggcgttcttactacgtgatgaaaattcgttcgaatctgccagcgtcccgttataaggatgacgttttacgattcgtgcatccggtaggctttggctttatcgggatcaccatgctaacggtgttcatcaactccggtttgtctatgacgcatagtgaaacgatcattgacattcttcgaaattatcgcttcgatagcggttatccgaagtattggcctgatcgcgtagcacgtctggacggtaacggaaaccagacatttgaccttgtaactggtgaagcattgtacgacccgcacccgaaagcgggacaaccgtttgatgttccgccacaatatgacattgatgaaaaaccgctgaatggtgtactgccgtccgcgcgtcgatttgatcaaagtcctctgttcgatagttcagcggttaaatactctcagttccgtaacttagtggaaaaacgattgaaagacgacgcgggtaatcctcgcgatccgaatccaccgactcagagaaaggtagcataatggctcaacaaaacatctaccgtgcggtcgtaactggtaagttccgcacggaaaacatgatgaactttcgcgaaatgatcggggacacccccgatcataactcgatttatatgtcaatcgggcgtaccgaacaatgggcggataacgaatccgaccctgaattcgctcccccttatccgaacgatgatacagatggtatcgttgatatgtggacgcatatgatcgggatgacgaaagtaccaggcgaaatgattgatgcaatcgttccgcgtaaagactggggcgatactcgatatccaaacccaaaaatcttttacattaatgacatcgtggttgtaaactccgcgccttataaccgtactgactacggtaaaggatggatggtataccgcgttgtagacgttcctgatattggatcttgttcaatctccagtatcacgggtaaagttgaatgtgtgcgcattggtggcatttggacaccgacccacgaatcgatcgaacctccgcgcggggaagcgaacggtatcgacatgggcgacggctatatctgggaatatctgtatacaattccaccagatgttgttatcaaccgctgtacaaatgaacatatcgttgttccgttccctgatgaacttgaagaagatccggttcgttggggttatgataacgtgatcaaatggtatcctgatatgtacgatttggtgtaccgaatgaaggttcactcaatgcgattccgcgcgtatatggattccctgttcttcccgcaagcctctttacctggcaaccgtgggttccgtcaaatcagcgttattgtaaatccgctgttgaaaaaggcgcaaccatccgacccagaagtaaaagcaacggggcagtattacacgaaaggacagcttgaacttgactcaggacaaatgatctacatggaaaaccgtcaaccgattattcgttctcctgatcagaccgaagaagtcagtattattttcgaattctaaggaaaccataatggcatatcaaactggtaaaaaattaattgacgtggggcaaatcggcaacccgtcaactggtgacccgctgtatgacggcggtgttaaacttaacgaaatcatcaccaacgtatacaacgcgtttggtgatgtgcgtttactgactgcgaatgatggtgtgggtacaatgttactccacgcgaccggatatttccagaaattaccgcgaacttattattcaggcaacccgatcgaactgggttcattgcatgatatggatacttcaacagggccaattactgttgttcttccatcgggtaaacccggcgaagggttctatttcataaatagtaacggtagtatttctgttgatcgtcctgttgtattccgtccgcaagttggtgatggtatcaaaggggttcaggatcaactttacgtgacctctccatatactcagattaaaatctggtgtgtgaagaaagaaggttccgttactacatgggattattctgttgaatcaatgtttggttcaaaaacaatgcctgtagatactactaaactcattctgaaagcatcaccgaccgcaattcctttatttggttatagtgaattcagtggggcgaaaattctcgtgtacgcggagaatatgacaggcacagtcaataaaatggctgaaattcttttgtctgttgaccgtgtcgctaagggcgtgtattcaactgaatacgcagttctcaaaaatagcgaagatgaaatgtacacgcttacgttcactgttggtgcgagtgatattgtttacgcaaacgtacaatccaaaaccgaggatcgcattaaattctcgattaaagcggttgacaccattaaatcagggatcgcagcatgaaacaagaaattcttatcggtaacgtggttgatgacggcgcaggtgattatctgcgtcgtggtggtcaaaagactaacgccaactttaccgagttatataataaactgggtgacgggagtatcccgcacccagcgggtgcgtggaaaacgcacacagcgcctacgctgacccctattttcggtgaatcatgggcgctgaataccagcaacaaccgtattacggtaaacctccctaaaggcagtgtaagcgattataacaaggttattcgcttacgtgacgtatggggtaagtgggcggtaaacaacgtccgtatcgtccctgcaagcggtgataccatcaaaggctcaccgacttacaaagaactgtacaaagacctgatggacgttgaacttgtttattgttctcctggacgttgggaatatgttgaaaacaaacaggttgacaaaatcacaacttcggatctggcaaccgttgcgaaagaaacgtatatcgcgactcagggacaaactgacttcctgaacgtgttcggccctggtaactcgtacaacgtccgcgcactggaagtttactatcgcggtaacttgctgtacatcgacgacaagaacgggtttaattcatcaaacagcgattacggttcacctggtgcgagcgccggacaactggtagatctggatggtgtaaatatccgtcttaaaaacccgtgtaacgctggtgacacgcttcaattcgttacctatctggatggtattgccgcatggcgagcgacgtatgaagcgcataccatgcgcgtatataacacgggagacacagaacaggttagtatccctggtgaaatctgggttggtgatctaccaaacaaacgcacgttcactaatgctgaatttggtatcagtccgcgaattttgattaacccgaactcgttcgaactgctgctgaacggtcgccagcttgttaaagcaggcgatgcggatctcccgacatttgtttgtgagggcgcagaaggttatgatgaagatagctgtattgcgaactccggcgcgtgggttccttctggacaggattacagtctgatttttgttgactccgtggttactggcattaaatttgctcaacctctggaatcccgtgatgtggtaactattcgctggttcaacaatgatatcggtactgtaatggaatgggacggtgtaggcggtattaaagaacacaccgataagatttacctgaacaacgaagaagaagtgacgctggttaatcagatcgaatataccgattataacaacccaacgcagaaaacctcgcgtaaagtagcggatacatttagcggtcgtcttctggatctgcaagcgttctttgatgttattcacccaatcgggacaatctacgaaaacgcgcataatgatgctaacccaggcgattatatgggctttggtatctggacacgttacgcggaaggtatgttccttgcaggttggacaaccgatgcatcggatagcgattttggtctgaacaataacgatctggatggttccggtcaaccaactcacacttctggtggtactggtggcgaacgtggttatgaaattaaaccgatcaacgttccacaaattcagtcaaccgataaggtgttgattaaagatgacaacgggatcattattattggtggctgtcaggttgacccagatgcaacagggccaggttacactaaataccgcgaggatgtattaaaagtaaatcgggggaacactactccagataaactaaaaacgctcccgccttatattactgttcaccgctggataagggtagcataaatgactcagtttatttccaaaacaagggagggggcgaaagtcccttcccgtgaagcagactttttgcaatatgaaatgggtacgaaagaaccgctgattggtggtaaacgtactattggtggtgcaaacgtcgatcagcttcgaaaaggggtagattaccctaacgtacaatcagcaattgatgacctgtattctttgtctcaacagatcccgatcaatggggtaatcatgatgacggaagatagccccccttctgcggtgcaacaggtagaatcaattacgtttgatgggacggtttcaaacccagatccagatcaaacacaggcgactattcacgtttatggtttcccgttcgttttcgacaatacaacgaacgcctctaccgtatgtgagacagtctataacaaattcgttgaattcgtcaacgatgaaaaatatttcgatttggttactcgtaaaggtctcaacggggaaattctggaagttcgttttattgattcagttccgcatccggttactaataaaactgaatacggaatttcgatggtaggaacaatcgacgtacaggctaaatctggttacggtacatggacaaagttaggtgaaattgaccttgctgttactccagcagttccgatttattatttcaagcgtattgcatgaggataacaaatgaacaatacaattaaccacgtaagcgataaatccgtttacgtgacatttgatcctgctggtacgcaatggcctagcacgtttaagaacgtacaacaggcattagccgctattgggccgtgggcgcgtactgatgttggtttgcctaatgccgcgcctggtgtgcgcggtattgctgctattgcgacacaggcaatgattgatgcgggtactgatacccagacgatcgtaactcctgctttgctggaataccgtctgcaaaaccctcatgcatcacaaaccgtatggggttacactcgttacgcaactgatgcagaatcagtaacagtaacaaacgatctggtttctcttactccgcgctcgttgaactatgtgtttaacacccgccatgcaaaagaaaacgtttggggttctgtgaaactgtcaacaactgctcaggcaacatccggtactgatgacactaccgcaatgactccgcttaaagtgaagcaagcgatctctgctctggttccggtacaggcaaacgcaacagaaagttcgtttggtcttgttcagttagcaactgttgcagaagttcgcgcgggtactattcgcgatgggtttgcgatttcaccatacacgtttattcgtctgactgcaagcgaaagtgatttaggtttactccgtatcgctacccaggcagaagtaaacgcgggtactgataacaccaaagcgatcaccccgcaaaaactcgctgctgtgaagggttccggctctactttcggtatggttaaattaacaacagatatcaataccggattagcgaatactgctttgtctgctggtgctaacgtagtaccgagcaacaaaaacagtgcaattactggtggtgcattgtatcagggttcgattagtgctgacaataaataccagacaaagacagatgttgacgcaaatatcccgatcggatgtatgatgcttgcagcgtttaacgccgatgttggtaacttgtttatctgtaacgggcgagcaatgaaccgcaattcaaacccagaactgtttgcccgaattggttatacatacggcggttctggtgatattttcaacttgcctgatatgcgcggtcttgtagctcgcggctttgatggtgggcgtggtgtggatgcaggtcgcggttttggtacatatcaggctgatatgtttgcgtatcacgaacatgatctccagatgatttaccagaacggcggtaatcttcctaagagtcaagcagtttatgaactgaaaggcgcggaaaaaaatgaccaacgtgttatgcacctgaataacgattacagcaaagcattaggtactggcggaaatgaaacgcgaatgaaaaaccttgcggtcaactacgtaattcgagtacgataaaggggttaatccatgatttcaaaacttaacccgttaccaaagatcccgtttgttgatggtgtccctgcggacaccacacaaacccagatcaattggattgttaacggcgaaactctcgatggtgcaaaaaccaaaaccactaacgagggttctttaaacagatgcggtgttctggttcaaaagaacgcggtacaattagaagcaaatacaactacccagacatcaaaaatcaacgaagttatcgatcaggttaacctcattactgaaaacctcgcggcgatctctgatgatagtgtgatcgacaaactggataaagttgtcgctgatgttgacgtgctgaaagtagatatgtctgctgtacaggcaactacagcaagcaacaccctgaaaattcaggatatcgaaaaggaaattggtgtatgggatgcgtcaaccgatcctaaacatcgtaccattcgaaaagatattattttcctgaaagatgaactgggtgcatatcctggctttaacgaagatggtgatgttgatccgtcctctactggctccggcgtgaaatacaaggtaatggctaacgctcaggcggtatctatccatgaagcacgtattactaagctggaagatgactgggtaaactcagatgtaggtaatttaaccgatgaagttaccgatctgcgtaacgaaatggggccgaagcatttagccactttcgaatctgtgtatgttcgtctgaatggtatcggtggcgatatcactggtattaataccgaactgtcaaacatcaacacttatatcgggcgtacaggctcaggtggttctggtagtattgattcccgcatggaaactgcggaaacgaacattactactctgcaaacccagatgaatgatccggttgttggtgttctgcctcgcgtaatccttctggaaagcgctgttggtaactcacaggttccaggtagtatccgttacgatatcagcacaatgaaacgtagcattagcgatctgaatatgatcgttggtgaaacaagtgatgatggtctgcgcggtgaaatggcgcaggttatgaccgatatcggtactgactcccagccaacaagcatcaaaggccgtctgctgaatgtggaaaacacacagcgcgacgatcaccaggcactggttgatgttaccgcaattgtgggtaatacgtcaactggactcgttgcggctaatatcgcgatgggtaaagctgtttatggtgatgcaaccagttctgatccattcctcaaagatggtattcagaaaacggctcgcgataacaaaactgcgatcggcgttaatactacaggatcagaaacagggatttataaactgatttccgatctgactgcgcgtgttgctgctctcgaagctggcggtggtggtaacgttgaacaacgtctggacgatctggaacagaataaagcctctcgccaggatgttgctgatgctctggttccgtatatcacagaagttgaagcggataacaaatacgaagcgaagaaagttccactgtcatttactcaaaatctggtcggtcgtaacgattatatcgagggtgatgatatttctttatctgttaccgttacaggtggtaaactgccttatgtgtaccagtggaagaaaggaaccgcaaatatcgggactgattcaccgagtgtaatgatccagaacatcacaacgagtgattccggcgtatataaagttgtcgtaaccgacgctgaaaataccgtgattacttctgatgaacttgacattgcggtacatacggttcctcagttcgatacaaacttgagcgatatttctgttgttgatggtgatccattgactctggaagtagtgtttagcggtggtaaaactccgtacacttacgtatggcataaagacggatctgtattgagtggtgaaactggttcttctatcgtcaagtctgctgcaaccagcgcagatgcgggtgattactatgtaaccgtaactgacgcgatgaacagtaccaacgattcagcaaccgcgactgtgactgtaactactcgtccggctctggcgtttacaacggatcttccggcaacgaagagttatacaacaggcgataatatggatttagccgttgttgttactggtggcaaaacaccatatacatacaaatggtttaaagatacggttgaagttactggggaaactggcgcaagcctggctacagtagcagaagcgggtgtgtacaaagttgaagttacggattccgcgacttctccggcgaccatcacctccgctgaatgtactgtgacggtagcataattttaacaaggggcgcaagccccttttgaggatcatatgattacgaataatccagaacagttaaaggatgaaattcttcgtcgtctgggcgcaccaatcatcaaaatcgaaatcacacaagatcagatttatgactgcattcaacgcgctttagacctgtatgcagaatatcattataacggcacaaacaaaacgtatctgattttgacactgggtgatgataacccgcgcaacgtgttcgacttgagcaaagaacacatcttcgcgatcacgaaggtgttgcgtacaaacatgggttcattgaccacaatggacggtacagcggtttatccgtggtttaccgatttcctgatggggttgactggtggctctctgggtgggcgctgtgcatcgagtgtgtacggtatgaacgcatacggcgcggatatgggctactttacccagatgatgtcctatcaacgctcaatgcaagacctgctggctccactgcctgattactggttcaacgatgatactggtcagttctgcgcatgggggcaggtgaacaaaggcgacattatcgttattgaagcgatggttcgttccttcgttgatgtccctagctccgtaggaagcgtcgcaggatacgctacagcgggttctaacgcagtggaagaccaatccatagccgacatctacgaaaacccgtataacagcgttgtaggcggtgtacgagcgggacagggttcaactgttacgggcggaacgtctgcatataacaaccgctgggtaaaagactactctaccgcactggtgaaagagatcaacggacaaattctggctaaattccaggggatgcaattgcctggcggtgttgctcctgatggtacgcgactgatccaggaagcggaaaccaaactgcaaagtctgcgcgatgaactgatttctatgtctgacgcagtaccgatcattatggtgtagggggaataatgcaaaactgggatgaaagtttattcgctcagttgtctacgggggaaggggttgatcgcaacttaaaggatcaggtcactaacccgtatgtaaactggtacaaatacaacccgacacaacagctacacgattcactgacagcagaatcaatccagatgaaatcgcctgatatgtattacgtccggcgtgacttcgtgaatattgataagatcctgggcgaagaccgagaatccaaatttacgaagtcatggaaaattgctgcatatattgaatcgtatgccaactatgaaggacaacgagatttctttagtaaatttggtctgagttcaaacgatgaaatgacgctggtaattaaccctcgtttgttcgcacatcaaactgatggtggtattcctgttctgggggatctggtttattttcctatggacaatagcctgtttgaaattacgtgggtagaagccgatccgttctatcagttcggtgatcgtcctcagcgtaaaatcaacctggcgaaattcatctacactggtgaagaactggctcctgaattgcagcgaaatgaaggaatccatatcgaacctgatgcagaactggatctcgaacctatccgaaatcttgacgggctggctgatatcaacatcgaacagtacgaagaagacaaagaatttgaaagagaaggtgatgaattcatcgaatcttttgatgttgtcaacggacgcggttcaccgtttgcaagtctgccataaatacgttatatgggtataggcggaagtctataccctcttcgaagaggattttatgatatggttgcaaaaatctctatagaacaaagagaacatcaattaaaagaacgttgtgcggaattagaactatcttttgatggatgggtagaccaatcagcgatcacaaaatattcaaagttttatgttgtttgcagtaaaggacatagaacagaaaaacagatcaaaccatttgtcaacaaaagtcgtccaaacggatgttatttgtgttcccctaagatgaaaatatcaaaggaaaacagaatcgaggaaatcaaaactcttgcagattcaattggatatacattcgtagatttcgttggggtgtataaagatgcgcacacaaaaatatcaatggtttgcgataaaggccataattgggatgtaagtatagttgcttttctcaatcaaggtcatcgctgtaaaaaatgcgcaacgtctgggttcaatccgaacaaaccagcatacgtatacgtacaatcactatctggaaaatttctgaaatttgggataaccaacagaacaccaaaaaaaagaatgtgtgcgcaatcaaataaatccgtttataaacacgaactggtttatcaaaaattattcgataaaggtattgatgcaatgagtattgaacagaagatcaaacaatctcttgtttgtggcgtagtcgataaatcagatatgatggatggatatacagaaacaacagatatatccaattacgataaactgttgaatattatagaaggagtataaaattgtttggctactggtataatagctcactgcgtaactatattgttcttatgggacaattgtttaaccatgttcaggttaaaagagtacgcggcgatcaagaaaaatacatcaaggttccgatcacctatgcatcgaaagagaagtttctcgcttccatgaacaaacttaactacacgttgagtcaggaaaacgttgctaaaacggaaacgattttaccgcgcatgaacttatcactggtggatctgcaatataacgcaatccgtaaaaccagtatcgcggtcaaccaaaaaatgacacagttagcaaccccacgaaaaacgatcacacagtttaaccctgtgccatatcgtctgattttcgaactgggtgtttacacgcgatatgaagatgatatgttccaaatcgcagaacagattttgccatattttcaaccgcatttcaactgtaagattaccgaactgcataagaacgatatcacagttgaccgagacatcaaaatcagtctccaatcggttgcgccggataccacattcgagggcgatgcaaatcaacgccgtcatgttgagtggtcatttatgtttgaattacagggttatctgtacccgcctgtaactgatgttaaaggcgaaatcagaaccgtttacacggatttcttcgctaacatgaacccgttagataaagataactttgaatccgtggatagtcaagccgatccggtagatttgcctatgcaggactacacgggcgaagaatatattcagacgtactcgcacgataagccgatcccgtctggtgatgaacctcctaagccgagggaatgaaaatggatgaaaaattagatttacagcaattgctgaatattgattccctccctggcggcgttgagtctggggaggatgtggttgtttacgagaaacttgaactggttgacgttcaatcacatccagcagaccggaaaccggatctggaagaggattatacgctcgcgcgtaagactgcgcaccatatgaatcagatgatcatggatatggcgcagatcgcattacacaacgcgaagaactccgaatcgcctcgccacgtcgaggtattcacaagcctgatgaatcagttaaacgtttcaaacattggcctgatgaagattcacaaagaaatgcgtgagattacggaagagactacaaaaccaggtgctgaaaaaggcggtggtggtagtgaaatgaatatcgagaatgcaaccgtatttgttggttcccctacggaactgatgcagaaatacggcagtgcatatgaacccaaagagggcttcattaatggtgaagctgtagaggtaaaccctgatggaaatggaaccgacgatcgatccgagtaaggaatcagatcaccctatcggattaatgcatcccaaatatctgaaaaagaaaattgatgaattggggatggagtggacacaaagcgaacacgataaaaaatggtatccgacaacgttcagtgactacctgaaaattaacggcattcaaaaggtcgatattcagtctaaggacagttcgaactttgccacgtacaaaaataaaggcaacaagaaaacccgatataacggcaacccaaacctgaaacgtgcgtatatccagactaaatggacgcaacaaatgttgatggagtgggtgaaatgtcgtgatgatatcgtttattttgctgaaacatattgtgcgatcacccacattgactatggtacaatcaaggttcagttgcgtgactatcagcgcgaaatgctgatcgaaatgcacaaaaaccgtatggttgcctgtaacctgtcgcgtcagttgggtaaaacaaccgttgttgcaatcttcctggctcacttcgtgtgtttcaacgaagataaatatgttggtgtgctggctcacaaagcctcgatgtctgcggaagttctggatcgtaccaaacaggcgatcgaactactgcccgacttcttgcagcctggtattgttgaatggaacaaaggttctattgaacttgacaacaaatgtaaaattggtgcgtttgcatcttctcccgatgcggtgcgtggtaactccttcgcgatgatctacatcgacgaatgcgcgtttatcccgaactttgttgatgcgtggttagcgattcagccagtaatttcttctggtcgtaaatcgaaaatccttatcacaacgacacctaacgggcttaaccacttctatgatatctggaacgctgctatagaaggaaaatccggcttcgtgccttacacggcgatctggacatcggttaaagagcgattgtatacagacggcgacaacggtacatttgatgacggttattcgtggtctgcgaagatgatcgctggctccagcaaagaggcattcttgcaggaacactgcgcggaattcatgggaaccagtggaaccctgatcgctggttggaagttgtcaaaactcacatggattgatattgatgaaacggaaacgaacttctatcagtataaacgtccagtagaggggcataaatatgttgcggtacttgatccagcggaaggtcgcggacaggattaccatgcaatgcatatcatcgacattacgacgatgccatttgaacaggttgcggtgtatcactcaaacaaaacgtcgcatcttattttgccggatatcctgttacgttatctgaatatgtataacgaggcatggatttacattgagctaaatagcacagggcattcagttgccaaatctctgttttccgaactggaatatgagaatgttatttgtgacagctacaacgatctgggtatgaaacagactaagcgatcaaaagctatgggatgttcgacgctgaaagacctgatcgagaaagataaattgatcataaataacaaaaagacaatactcgaatttcgtactttctcagaaaaaggcgtttcgtgggctgcggaagaaggatatcacgatgacctcgttatgtcgcttgcttgtttcggttggcttacaactcaaatgaaatttgccgaattctgcgagaaagacgatttaagactagccaatgaagtttttgcacgggaacgcgaacagctatacgaagacgcattatgtccggttatcgttacaagcggtgatgaaacgatttcggttggttctcacggtatttcgtttatataaattagaggaaattctataatggctttacaatctccaggtattgaaaccaaagaaacatcggtacaatctaccgttgttcgaaattcaactggtcgcgctgccattgtcggtaaattttcatgggggccagcttatcagatccgtcagatttctaacgaagtcgaaatggtaaactattttggttccccagacaacttgaccgctgactatttcatgagtgctgttaacttcttgcagtacggtaatgatctccgtgtggttcgcgttgtcgataaagatgccgctaaaaacgcaagcgcaattttcaaccagatcaaaacaactatcgcatcacagggttctaactacactgtaaacgatgtgattaaagtaaaatacaacaacgttgttgtagaagaaaacggtaaagtgtccaaagttgacagtaacggcaagatcctcgcggtaatcatcccaagcgaaaaaatcgttgcccgtgctaaacagattggtacttacccagatatttctactggctggactaccgaaattgtttctcagtcttccggtgtttccgcgtctattacgattgacggcatcgaaagcgattcagggatcactctgttgaacctggatattgcaaaagaaacaattcagggaaccgcattccagactcttacccagaaatatcagatcccgtctgtcgtggctctgtatcctggtgaactgggttcaactgttcaggtggagattatctccaaagctgcttacgattctggcgctatgatttcaggctacccttctggggtttccgttaagaacagcggtcgttctgtaatgacctacgggccacagaccgataaccagtacgcttttgttgtgcgtcgtggtggtattgtacaggaatccttcatcgtgtcaactgagaagaccgataaagatatctacggcgtaaacatcttcatggatgactttttcgctaacggtggctctcagtacgtttacggtacttccctgaactggcctaaaggcttctccggtatccttgagttcggcggtggtttgtcctcaaacgacactgtaggcgctgatgaactgatgactggttgggatatgttcgctgatcgtgaagcgctgcatgtacctctgctgattgctggtgcgtgtgctggtgaaactgtagagatcatgtctaccgtccagaaacacgttatctctatcggtgatgaacgtcaggattgtactgtgtttgtgtcgcctccgcgctctctgatggtgaatattccactggcaacagcggttgataacatcattgaatggcgtactggatataaactcagtggtggtactccggttgacaataacctgaacgtaagttcaagctatggcttcctggatggtaactataaatatcagtatgataaatacaatgacgtgaaccgttgggttccgctggcaggtgatatcgctggcctgtgtgtttacactgatagcgttgctcaaccgtggatgtctccagcaggttacaaccgtggtcagatccgcaactgtatcaaactggctatcgaaccgcgcacagcacatcgtgacgcaatgtatcaggttcagattaacccggtaactggtttcgcgggtggttccggcttcgttctgttcggtgataaaacactgactaacgtaccgagtccatttgaccgtatcaacgttcgtcgcttgttcaacatgatcaagaaagacatcggtgataacgcgaaatacaaactgtttgaaaacaacgacgatttcacccgttcttcgttccgtatggatacaggtcagtacatgactaatattcgtgcgctgggtggctgctacgattaccgtgtaatctgcgacaccacgaacaacacaccggacgtaatcgaccgtaacgagtttgtagcaacgatctacgtgaaaccgcctcgttctatcaactacatcactctgaacttcgtagcaacgtctacgggcgcagatttcgatgaactggtagggccgcaagccgtataacgtcaagggggctgaaaagcccccataaataatccgaggttaaaaatgcttactgacattttacgcgcctttgaatccggtgatttcgcacgtccgaacctgttcgaagtagagatcccgtatctgggcaaaaactttaaattcaagtgtaaagcggcaaccatgccagcggctacagttgaaaaagttccggtaggataccaaaaccgcaaaatcaacgttgctggtgaccgtacctatgatgactggacaatcacgatctataacgatgacgcgcataatacgcgtgacgctctggtagcatggtcaaacatgatgcacggaatgggcgatcagattagtggtgatattccagcgaactacaaaaaaaccgctacggtgaaacagaaaaaccgtaacgatgaaattaccgccgaacataccattcacggtcttttccctactaacgtaggcgaagttaccctggactgggacagcaacaacgaagtgtcaacctttgaggttactttcgcgctggactggtgggaataaaggctataaatacaggggtagcaatacccctatcattatttttcggagttactatgaactttttgggctttggcaatgtacttagctttttcaagaatttcgcccgtgaggacgaattagatcttgaacagcaattaaaaaatgatacaggttcggtcgcgcctcctaaaaataatgatggtgcttatgaaatcgaaactgatctgactaatcagaaatacgcaagcgtattccagcagttttattctggacaagatccggcgattcagaacaaagaacaattaatcaatacatatcgcggcatcatgtcttacccagaagtagaaaacgctgtttctgaaattattgacgatgcgatcgtgaatgaacagggcaaagatatcattactttggatcttgccaaaacagattttagtaaggcaatccaggacaaaatcgtagaagaatttgataacgttctaaatatctatgattttgataacatgggtgcgcgtctgttccgtgattggtatgtggattcccgtatatacttccataaaatcatgcataaagacgaaagcaaaggtatccgcgaactgcgtcaacttgatccgcgttcgatggaactgatccgcgaatctatcactgaaaccctcgatggtggcgtgaaagtattccgtggttatcgcgaatttttcgtgtatagcgctcctaaaaatggctatacatacaacgggcagatctaccagcataaccagaaggttaaaatcccgcgctccgctatcgtgtatgcgcattctggtctggaagattgcagtaacaacattatcggatatctgcaccgcgcagtcaagccagcaaaccaattgcgtttactggaagatgcgatggtcatctaccgtatcacccgcgcacctgaacgccgtgtgttctacatcgatgtaggtcagatgggtggcaacaaagcgacacagtacgtaaataacatcgcacaggggcttaaaaaccgcgttgtgtacgatgctaaaacgggtactgttaagaaccagcaaaacaacctgtcaatgacagaagattactggttaatgcgtcgtgacggtaaagctatcaccgaagtagacacgcttccaggcggtgcgaacttctctgatatggatgatatcaaatggtttaaccgtaagctctatgaagcactgcgtgtgccattaagccgtatgcctcgcgatgatgggggtatgcaaattggtggtggtggcgaaatcacccgtgatgaactgaaattcagtaagtttatccgcacactgcaaattcagttcagccctgtgctttccgatccgttaaaaactaacctgatcgcgaaaaaaatcatcacagaggaagaatgggaagaaaacgttagcaaaatttccttcattttccagcaagattcatattatgcggaagtgaaagatattgagattatggaacgtcgcctaacgttaatgtcacaggttgaaggtgtagtagggaaatatgtctcccataaatacatcatgaaagagattcttcgaatgtctgatgaagacattgacgaacaagcgaagctgatcgaagaagaatccaaagaagaacggttcaaaaatcccgaagaggaagaggaaaacttttgatgaaagaatttatcgaagcaatcaaaagcggtgatctggtggaagcgaagaagcaattctattccatcatggaagaccgtaccgaagcccttcgccaagaaatgcgcgttgaactcgcggaagctgtacgcatcgaaggtgaaaccgacgatgacgacaacgatgacgatgacgacgacaaaggcggcgatgataaaggcgacgacaaagacaaaaagccgtctgataaaaaagacgacgataaagacgaataagaggtgtaaataatgcaactcgaactcgaagaaatcagcgtcgaagatctcgaaccccatttaaccgaagcgaaagcccgtgttgatgttctggggatcgatgacggcactgtgaagatcatcgaaaatttggcggtcaatgaacctcatttagccctggctatgatgtccattgtcgagggtttgagtttagatgaagtcattgttaaacacgtagattcgcgcggtaatgtggaacgtaaaaaagaccgtaaaacccgtgaacgtaatgcgtatcaaacaactggtttaactaaatctcaacgtcgccaaattgcgcgtcgtgcgctaaaaacaaaacgtgcaaacccttctattacaacccgcgcacagcgtaagcgtaaaaaagcgctccgtaaacgcgccgcattagggctataaatatgaatgaatcccaactcaatgaaaacggcgatatgctgctaatcgaggaatggggtttaccttgtgcggatatttccgattcaattttagaatcggtcggtgagtcgaaaaaagacggtaaacttcggattgaaggtattttcctccaggccgaaaaagttaaccgcaataagcgactgtatccgaaaaaagtattagaagaagcagtaaacgattatatcagaactcaggttaatacccgtcaagctctgggtgaaatgaatcatccgccgcgaccgaatgtcgatccgcgtaatgcttgcatcctaattgaaaaattatggtggaaaggtaatgacgtttggggtcgcgctgttgttgtcgaaggtgataacggtgatggggataaactcgcggcgttaattcgcgcaggttgggttccaggtgtttcttctcgcggactgggtaaactttccgattctggaaaaggttacggtatcgtacaagaagggtttaaattggcagtaggcgttgatgttgtttgggggccaagcgctccagatgcttacgttaagccgattaccgaatctcagtcaagcaaaacgcttgttgagaataatagtgctgatgatgacgctttcagaaaactctctgaacgtttgaaaagtctatataaataatatcatatcaaacaggaaacttagaaatgcttaaagaacaactgttggcagaagcccagaacctggataccccagttgagttagacagcattttcgaatcagttgaactttctgatgatgcgaaagcaaacttcaccactgtattcgaacaagctgtaaaagcaggtgctgcgaaactcgctgaaacccacatcgcccagatcgcggaacgctccgatgaactggttgaagcccaggttgccgaaaaagctggcgaaatcgaaaataaactgtacgaagatgcgaataaatacttcgaccacatcgcgcaggaatggctctctgaaaacaaagaagctgtatcccgtgatatcaaggccgatctgttcgaatctctggtaatgggaatgaaagaactgttcgttgaacacaacgtagttatcccagaagcacaggttgatgttgttgcagaactcgaagatgaactgaccgagaatcagcaggaagttaaacgcctgttcgaagctaatcaggctcaggctaaagagatcgccaacatgaaacgcgataccatcgtttcagaaaaaacaaaagatctgactgaatcacaaattgaaaaggttcagaacctgatcgaaggtttggaatattccgacaagttcgaatccaaactgaccgcaatcgttgaaatggtagcgactaaagcggaaaaacaggttgaagagagtaccactactcagacaaccactaaagatgactttgttccggtgaatgaaaatacacctccagcagagaaatcgaagatcaataaatatgtacaagcggctaaagccctttcctaatcttataaggtaagaaacaatgtctaagaaaaacgaattgatggaaaaatggaacgatcttctggaatctcaggaaggtttaccggatatcgctaccaaatccaaaaaacaactggttgcagcaattctggaaactcaggaaaaggatgctgatactgatccagtatatcgcgacgaaaaaatcattgaatccttcggcggtttcctggcggaagcagagatcgcgggtgaccacggttacgacgcaaccaacattgcctctggtaaatccagcggtgcaatcaccaacatcggccctgctgtaatcggtatggttcgccgtgcgattcctaacctgatcgcattcgacatttgcggtgttcagcctatgactggccctactggtcaggtgttcgcactccgtgctgtatacggtaaagatcctctggctggcggtactcctgcaaacgttcgtgaagcattccatccgatgttcgctccagacaccatgtattctggtgaaggtgcaaacaccgcgtttgctgctatcgcttccggtactgctatcgcttccggcgctatcgttaagcacgtattccaggaaactggtatcgcgtacttccagaacgtaacctccggcaacgtaaccgtaactggtgctgatgctgctgctctggatgctgctgtaatcgcagaaaacgagaaaggcactctggctgaaatttccgaaggtatggctaccagcgtagcagaactccaggaaaacttcaacggttccagcgctaacccgtggaacgaaatggctttccgtatcgacaaacaggttatcgaagctcgtagccgtcaactgaaagcacagtattccgttgaactggcacaggatcttcgtgctgtacacggtatggacgctgacgccgaactgtctgcaatcctggcaactgaaatcatgctggaaatcaaccgcgaaatcgttgacctgatcaactacaccgcgcagattggtaagactggtttcactcagaccgttggctctaaagctggtgcgtttgacttccaagatccagtagatattcgcggcgctcgttgggctggtgaaagctataaagctctgctgattcagatcgacaaagaagcgaacgaaatcgcgcgtcaaactggtcgtggtgctggtaacttcatcatcgcttcccgtaacgtggtttccgctctggctcgtatcgacagcggcatcactccggcaggtcagggtctccagaaaactctgaacgtagacaccactaaagcggtattcgctggtgtactgggtggcacttacaaagtgtacatcgaccagtacgctcgccaggattacttcaccgtgggctacaagggtgataacgaaatggatgctggtatctactacgctccatacgttgcgctgactccgctgcgtggttctgatcctaagaacttccagccagtaatgggcttcaaaactcgttacggtatcggcatcaacccgtttgcgaactctcgctctcaggctccggcagatcgtatcacctctggtatgatcagcaaagaaatgtgcggtaaaaacgcatacttccgtaaggtctgggttaaaggtctgtaatcgactttacactaaaaggcaacctacgggttgccttttttgttggtgtaaatagatacaggtaaaaagccctctaattcaggaaccaaagaaatgagtgataaacactacacaattcacaagttgatgcgtcagtcttcgcttccgtctggtaaacgagaaaaagttatcaacgaagcaacaggtacgaccgacatcaacgtacagaacacgcgcccagaactggtttctttgactcgcgcggttaacaacctgatctatcatgaactggttgctgtacaagaaacagaactccctgttgcaacactgttcggtgttcgctatcgcaaccctaacggtgatatgactttctccagtgctgcaacctattcaggccgaatctctggacgtacagacatcgacgaaatcgatctgactaaagcctacgttaaaggtgatttgttcaagcatgacggtactgacgttgtttatgaggtgattgcacctattaccctgaacactctggatactgacaaagacaccgcgatcatgaaagctgtgttccaaagcaagattcgtctggttagcgaagccgctgatacttctaagtatgaaaccagtgaagatatcgcgtcaacctccttccagatggatcgctggaatattccggtacgttcgcgtaagtttaaaaccgaaatgacggttgaactgatgcaggatttggaagcaaaccagtttgaagctgatggggtgatcgaagacattctgggaaccgtggcaagtgaagaagtcaacaaagacattattcaaactctgatcaccgtttccaaacgttacaacgtggatggactcgttacggatggtatttttgacggcacaaccgcatacaccgcgaaggatgccccagcattgggtcgtatcctgtatcaattagcgtgtgaaatggggcaggaaatgaatagaacgacttcatttgatgctacctacgtcctcgcaacagcgcgtgttgtaggcattctggctgcgtctggttggatgcacgaaaccgacgaacaacacccactggcaacaggtaagctgaacaacggttattatgtctatacagacaccaacagcccgttcgattatatgctgactggttgcaaatatgatctgggtgatatggatcacgtaggctctctgttcttcgctccgtataccgaagctgacgaagcaggttcaatcaaagtatccgtagatccggcatccctgcaaccaaaagttgctattctgatgcgttacggtctttccgtgaacccgtatactgctgaaagtgattctgatcgcctgatcaaaggtgatgattggtctgctcttgcaggtaaatctaagctgagtcagatcgtaggtattaaattacctaaactgggttaacaagttttgttttgagaagaccattatagtaataaagatctataaggtcaaacgagcgaagcgagttttcacgaacgaagtgagtgatgggtaagtacgatgtactgtttataatatttatattttatatatagagaaaacagtacatttccgtatactttttaaccaacattcactcactacgttcgttcatgtactcgcttcgctcgtagatttgacttcttgatctaactggttataatgttactttgttttgaggtgatacatggctgaactaaaacttgaagatctacaggctgaacttgaagaggatatgcgtattgatccgttgaagttacaaagcgaatcagcagacattccgaagatttggtcaaaatggcttcgataccattcgaatgctaagaaaaaacttattcaactccaggcgaagaaagaagcgattgtaaaagatcggttactgttctacactggtagacacgaaagcgaaatgaccgatgtcatttacactggttcgggtgaaatcaaaattgctatctccggtgatcctaagaccgttgaagttaacaagctgatccaatacttcgaactgattgcagagtttaccggaaaagcgctggatatcgttaagaacaaaggctactccatcaaaaacatgttggagatccgtaaacttgagagtggtgcataaaatggcagaagaatttgattgcaaatgcgttgtgtgcaaacaaccgatgaactcccgtaatacggcgtttgtcaatgaagctggcccgatctgcggtgtcgtatgtttgcaatatctcaacgaaaggaatgatcgcggtatcaatgaagccgacgatctgaacgaagttcaaatgttgctgtaggtgtgaatatgaaagactattcaaaaatcgactttaacgaagtatttcgtttgctgggattgatggaagaatgtgtgaccagggttcatgcacttcgaatttcgtttgaaagcggttgtatcgaagacgaacgcccagatttatagcagtaaatagatgtgtaccccttgtggggcttgggcttaccgtgtggcgtacccatttgcgccgtccgatagaatttactttcggtggggtgattggtaagataccttcgagtaaaggccagttaattgtaattcagaatagtacagcactgaaataaaataaatgtacgtgtcggaacaaacggtttccgaaattaaaaagccccttcctttcggttggggctttctttttaaaacttctcttcttctccggtttcaagttcggctttcagttcttctcgccgtcccttgatcgcgtcacgcattgaaatgtcatcggatgctgcaacctcgacttctttcacgcgggtgttgtaatacttttcaagttctttcaaaccttctagtgtccggcacgaagcaaccttattcatgaaatcatcaatcgctgcttcgtttacgaatgtagtaaaacttttcattttggcctcttaaatttctacctgtttgatcgcgtagtcgaatcgttcttcattgtagatccgcacacgttccatagcatgtttcataccgtagtttgtcgcactgtatttatttttggctgtcttagactttgacagcgtagccaggttatcaacgatatcccatacagtagcgagcgctttcgatccgtgcttacgaagtacacgaccgatagactgtttcaccacaacagcagatttgcaagggtgcgcaaaaatgatgtggtgtaggttcttgattgagatacccgtactcagtaccccgatcgaaccgatgacgattaaacctttcgtcgattccgcgattttcttcatttcgttacgatcgtcaatatctgtatcaccattgaccaacaccacgttatcgtaaaccttgctcaactgctcgtacagccattttccgtgctctttgtaccggaacatcacaaaggcgttttcgttcttctcacgggctaatttgagcgctaattttagaatccacgcgttgcgccgtgtgtggctggttacgtacttgatttccgtctggtagtccgcacccttcaattttttgacctcttcttctttgtatcgaaggaagatcgtgttaattttcaggttggtgacttgtccatcatccatcaaacgacgcgtatcaactggtttaaagactttgccgaacgcaccgatgtattgcatcatgttcgttttcccttctttcagggaaccggataagcccagtttgaagatacattgatccatcgtgtcgataatctttttgatgctcatgcctgttgagaggtggcattcatcaaccatcaaacacatgaactgttggaaccattcggcaggcattttaaccgctgattgccaggtagaaacgtaaatcagtgcattactgtttttcgctgtaccggaacggatacccagcattgccgatttcgggaacaaacgatagtttgcgatgtcctcgatcatttggtcaacaagtgcggtagtcggaacgatgatcaacactttcccgctgtaatgttccagacaccaacgagagataagcccctgaatcagagatttacctgctgatgttggcaggttcagaacaccgcgacggtttttgataccgtggaacactgattcgcgttgataccagtacgggtcgatctgtttgtcgccgtcataaaccggatgttcgctaacccacttatcaaaatcttcttgcgtgatatcctcagtttcgtggatctttggatcaacccagattgaatacccgcgtgattctgcgaatttggataccagataggctaacccatacgggagtttcccgttgtagtccatcaagtaaatgtaaccgttccatccaccatatttgtatttggcctgatactgatagcctgggggctggaagctgaaatagtcacgcagttcatagacaatgtttggttctgcctgaatctgtacgtggcttgtgtttaaaaatttgacttcaatatccactatgattaccctatgtacaaagtatatacgtatttatgtcataaatattggataaacacttggagataccaatgaacattgattacgaaaaagttgatgggttccgtaccctcgacgcaaaagaacagaaaggcgctttagccgattacgctatgactgtgtttgcggttaagctgaacaaacaaaaatccttcgataacatgctggcggatctggttgctgctttaccggaagatgaagaaaagccggaactgctgatcgattcaccagaaccggaaatcgtcgcatataaaggtgaggtgactatgggtgaacctgtcatcgaagccccgaacgttcccgatgtggttattgatgcttctgcggattttatggagtacgttaaagaggtcgcgccggaagtagccgatcaaatccaattagtacctgatgtcgtagaagctcctgtaagcgcttctgacgagtccaaaggcgaactggtatggttggaagggtttagcccgacaatcttcatgatggggcgctctgcgagttctaacgggtattatacctgtccgtggtggatctatgactggattaaacaaaccccagactggtacaaagatcctgatagctgtccacatgcaagcgcaatcgacacaatcaaatcacttgcgttctatatcgtgcgcgatggcgaagttcgtgttcgcgaaaccagaaatagccgattcgaaacatttaagttttagcactttttgctaaaaaacttgttgacgcataccctcgtttaaagtatatttgtactcgaaggcgggggaatggctctcgcagtgaagaaggaaagcaaaatgaaaaacgaaatgatgaaaaatgcttactacccagttctgtttgtttgggctgatggtaaagtgaagaaagtagtcaattcaaatgctccttactatactgttgaagaagcactgcgccacgcttacgaagctgattatcctgtccctgctgaacctggttatgctcgttggaacggttcaaaatgggttgctgatacctgggacaactacgaagaagcaaaaatggaatgcgatcctgattatgtttctcgccaaatggaagcgcacatgattgcagaccgtcgcctggataacgaagctcgcggtttctattaaaattcaaagggggctacgcccccttttttgtaggtaaaatatgactgaattaaatcacgaatgcctgaaagacttatcagaaggtaaagagatcggaaacgtcatcttccttgatatcgacggcgttctaaataatatgcggtgcatgaaatttggtgagcatatggacattgaatgtgctcgacacctgcgccggatcgtaaatcatgcgaactgtgatattgtcatttcctctacatggaggatcggcaacacaacccatactctacgggaaatcttctacccgtggggattgtatcgcatcattgggaaaacctgtacgaatctaacagaccgacaagcaggacgcggtgatgaaatcaaagcatggatcgacaccttcggatgtaagaattaccttatccttgatgacgataccgatatgctaccggaacagagtgaacatttcatcaataccgatgggttcgtagggctgacagaagaacaatccacttacgcgatccgtaatgtgttcggtgtaacaaacccgttctgtcctgaatgcaacggctatgggcgcgtgaaccaatatgataaatgtccgtcttgtgacggcaaaattttacttctctaaatagagaaaaactaagaggttttgaaaatggctacagaaaaatggactacggtacacccgatcccgtggcgtaacaccagctttacctatttgccgtggtggatctttgatatcatcgtggctgcgaatgctgcaagcgaagactggcgtgattatgccgaagaaaaatacgcgaaagaattcgacacactgaaacaggcgtatattgattacaccgatgttgatttcatcgaatcccgcaacggttatctgtataagctgagtgattttactcctgctgatcctgtcgtaacaattacaccaaaaaccgctcctgctgatttcaaagtaggtgatgcggatctggctgcaactgatctgtttaccatcgatccttctggtacagaaatgactctgagtgttgactcttccggtcatggttctatcgttggtggtaaacttcatgcggttagtgaaggtgatgttgtcgtaacagcaacctctggatctgttactgcaactctgacggtaaacgttaaacctgcaccataataacaactaagaaggtaaaaatgctactatttgaattcaatgatgtattcgcaaaattcagcgacgcaatcgaagccaaatttggcaaacgcccacaaaacatgacagatgcagaatatgaagctgctgtatcgtccctggttcgtacagatttctatgaaaaactggcgatcgaggtgttgggttgggatatgatgaaatggggcatgacctatcgcgatcgcgaagtcggttttattctcgtcaacgaagcaaaaagcccgtcctgggtgaatagtcaaaaaatcgcgtacatggataaagtatgcgcacagatgggtattgtacgtttagacttctggacttgtcgggatctgaacgaactgaaagcccacgcttaccgttgccctctgatctcccgcaatgataagcatcgtcaagcatgggatagcgcagggaaatatcgtagtgttttcctgaacgacgatatgaacatcactattcatgatgtgaaccgctcctttgcggattacacaccataaacaaaaaagggaaccgcaatggttccctttcttttatgcaatttttctgatttctttcaatgcttcttctttgctaccaacgaagagaatcgctttacctccggcttttctgaatggcaacacagcttttgccctgtcatcaatcagtatacctttgtccgcatatgctgctttctctccgctgcttttggtgtagtggaattcaggcagataaccgaacaccttcatcaacgcttttcttttttgttctgctaccgcatcggaattgtatttccctacgctggttaagatcgcaacctgacctaaagttctcaaatgacagaacaggtcgatgccctcttgtaatggttccagattttcgtagaagtcagtttgtgatatagcctgtttcgcttttttcaattcttcttccggcattctcgccgggtctccgtacatcggaacaaaagaaccttcccagttgaacagtacaccatccatatcgaacaaaaactttttcatatcaattcctcggtttgtgtgtgcatcatattcatatatgttcctattgtcaaccccatgtatcagttttcggtgcgtatgctgcaactttagccactaactctttatcaagctggtcaatggatttctgcggctttccttttgccttaactttgatgtagttagacttaacgacaaacataccgcctttgtcagatttcttgatttcgctgtcaatgcctactttgttgaagctgatccagatatcgccgtccatgtactgtttcagagagtcgcccatattcaggatcttcgccatagtgagcgctgccccttcgtgggtatccatgaggatttctttaggcactacacgatcgcgtttaaggttctgctgcatagcaatatgaacatcgttcataacccaaacgatatggatgttttctttctgataacccagcgcttcaacatcacgggcgatacttgccagcttgctcatgcttttcagggttacgtcaaagatcaggtttggtttacggtcttccggtgctgctgtgataccagcgtacacacgcgcctggtttttgttggatacgttgaacacgtctgcgatcacatgatgcagtgttgctacgttgtccgggtttttcaggttcattgttttgacatcgtgaccagttttcgctttgatctctgctgccagtttggtactacccatgaccaattttttgagtgcgtcaacgtccagggtgatcccttcgatgcctaacagcttttcgagggtgaaccctttaccagaacccgcgccgccagccaggatgactacctgaccaaatttaggataagccttaccgccgaaggtgatcagcgcttcatcaaggctcgtaaagtctttgaatgatttcatcttagaactccaggtgtttatttaaaagtatttattgacacggtttatgagtgtgtttatagtgcaattgttcgacggataggccggaagaactttaaccataaggtaacaattatgaaaaatgaactgcatgaattcatcaacgccgctgctcttggcgaccagtcaaaatataaatcccgtcgcgataccctgattgacgatttctgtaatctcttggggttcaagcgctggcataccccgtctatgcgtccagattgtgatccaaaatgggattacttcaaatggagtgctcgcgatcgtggttacgtcgataacgtccgcgtaatgtctttcaaccacttatacgcaaattcaacaattgctgttgctaaacgcaacgattcgacttatccgaacgggtggagtgttgctaaagtcatagaaacacttcttcaactgcgtcgcgaatataaatcagcataccgtgtcaatcccaatcctatctataatgaatggcaaatcgtcgcgaaatacctgctgaacatcacctattctattttctgtcgcttcgggacaaaagagattggatttggctctcatgatataattgcagaagcacgtcaccgcatggtctacgcgatcctaaaaattcaaaactctggtggtttgattctcgctgcgttctgtgatgaaattgtgtactatggtgaacaggtcgaagttgatgatgttcatcatgaaaaattcaaaagatttgtattcgggcaatataacagctattcatatggaaacgatattcgtgtgatgatgcacccgcgcattatgttggatatggaagggtgggaaccaggtcacggaattggtgatgccgaaagccaacgtgaacgccgtgttcgttcagttgctaaaactcgcgaattgatgacgggtcgccttactgattacctgttcagaacaaaagaagacgttgaaaaagaatttgttgacttgtcgggcgaatagcgataagctgtaatctctgaaaacaaggagataaccatgaataccattcactgccgcaaagagttcgttgagttctatcacggatcatgtactgctgccggaatcgaaagcatgttgttgcctccttgtgattctgatactctgtctgaaaaaggcagaaagaaaaatctggatcgtgttttcttcactgctgatatcgggctggctcgtatctatgctggaagggctgcacgttcaataggtggtgatccggtactgtatcgggttgtgtgtccggtagatgtggtatgcatgaacgatgacaaaggcgcaagcgtttatcatgctgcatgggctttctgtgaggaattatgaaagataaggtgttggcgtatctcgttttcttgctgggatatcgcgttgaagtgatgggtggttattcttctttgtatggggatttaaccgcgatctggatggttgcgttgggggttatgtttacctttatggcgatctgtattgcgaatgaggctgatcaaaatgcttgaattttatcctgctggttgcaaatcaaatccgcctgatgcgtcgttccaatcgtggatttattttcacagggaactaaacgacatcatcgaaagtcagtggaaagaccatcctgaacgaagtgcccccgatttagtcgatagcgtaacagatgtacgcaccctggaaaaagggctgtatgattgtctggttcagggaatggtgtgtaaattgattttgtggtatgctccgatcggttcagatctaactcgcaaaatcgcccgtggctatatcatgacgaaacgtgagtttgaccagatctggaacgaacccgactgtttcgaacgcgaaaaatatgaaaatgaggttagttgcatatgaaactatttcatgttgtgtatggtgggatgaaaaatatcgacatcgccgcgttatctgctggtatgctggacgaactcgaagcacagatcgggaaacgcttcaaagccagtatcaccgaaacacaaactttgtttgtcgatcaccctgcggatatggaaaaccttgtcaacactctggatgatctgatgatcccgtgtgctgatggttggaacgaagcatccggtgttcatgtagttgtaacttttgttctaaaaaatgttgacagcagaaatgccgaagtgttagagtttattcgtaaaattgattctactaaaggaaagtaactatgaaaatcgttcagcgtaatatcagcgaagttagccagcaggaaaaagtacagattcattttaaattcaatgatctgaaactgggctatgcacagatcgcccgtgagcacatgctcgataacggcgacatttacgtgattgttcaggaaatcgagcgaattcgtgctttccgcgcagaaaatccaaaagtgaaacatgttctgcgtcgtgtgtatatcaacaaacatcgtgaagaacagcgtaagcctaagaccaaagctaaacgcgatccgcgtccagataacaaacgtaaagcaatcaacggcgctatggcgctggcgttccaggaagcgggtttggtgtaaggggtttatatgtcttcaatgatgaatcgctggtcgggcgtgataacttcgactatcaaaaaggatttggtgaaggttgaagcaaaaccaaagccagtagaaccggaaaaagttcaaactatggtatcactcgatcctgctgagttagaacaccgccgccgtgcaaagcaaattgaattcgatctgcgtgtcgctcgttcatacaacagtaaaaacgatgatgcgcgtaaccgcaaccttcaatttgctctgacgttaagcgactgggcgaagctaatgagtgaacccgtatgttcttactccggcagaccgtttagcaacaaaggcggttgctctgactcccgaacaatggaacgaatcaacgcttctctgggatacacggttgaaaacacgatcgcagtaaccagcgccgcgaatagcgagaaatcaaatctcgatgcgtttatgaagggttctgtgatccttccagaagtaaaactgaaactgttacgcaaagctgcgtatcaaattgaaaaacaactgaaaatcaagggttaattatgtttgtgaaatattcttctctgactaaccattatgaaggtaaattcatcaatggtgtgatcatgaatggtttgactggtggcgtatgggttgcgcgtgaaaagatccacggggctaactttagcctgatcacttcggacggtatcaaagtcattccggcaaaacgtagcggtgaaattctccctgctgaacagttctacggttgcgaacccgtagttgcgaaatactccgaacctgttcgtaagatgtgggaaatgatctctactgcgcgtcagttaagcggtgagtatagcgatgaactggtgatccaggtatacggcgaattcgcggggcgtggtgtacagaaagatgttgactacggagaaaaagatttctacgtatttgatatccgcgtcaatggtcagttcctccctgataacgttgttgcgaattacgctgttgctgttggcttgaaaatggctccactgctggcatacggtacgtttgacgagatccgcacactgcctatcacctttgattcggtggttaacctggcgaactccggtgcgatccctgcaaagaacggcgttgaacctgagttcaaaaacttcatgacgctgaaagatggtgaaggtgagaacatcgcagaaggtttcgtgatgaagcctgttcaacccgctttcatgccgaacggtgaacgcgttgcaatcaaatgcaaaacgacgaagttcacagagaagaagaacaagcaagcgaaccgcttcaatgctccttctgaactgtcagaaacagacaaagtgaagctgaacgaattcacctgctacctgactgaaaaccgtgtgaaaaatgttctgtcaaaaattgacagcgcgaatctcaccgcgaaagatttcggtcgcgtgatggggctgacggtacaggacgcgctggaagaaatcgaacgtaactacgggcctttcctggaacagttcgaaaatccaacgctggcgaagaaaaccttcactaacgaagcgtcaaatctggttcgtgagaactggggcgcaatcctgaacaatgaattttaaaactgttctcgaaaacgcaaaaacggctaccctgatcggtagccgtgaaccccctgaacgtatcgcgagtatagccataaagattggacgtgctttaagtgatcgggggatcttcgcttactctggtggtgctcctggaatggatagccatttcatgtttgactactcaccagaaagacggcgtataatcctccctgagaacggttttaacgggttgtattcgaatggtaaggatatcatcgactatacagaatacgacacgtacaaagccgctgacgaagcgagaaaggtagctggacacttcgacaaccaaagcgaatggacacaacgccgatacgctcgcaattcaatgcaggtattaaccgaaaacctggacaaacctacagattttgttctattctgggcggtagagaaagatttttgtgttaaaggtggtactgcgatcgctgcaaggcttgccagattgtataaagttccaacgttcaacctttggaatcaaaacgttctggatgaagtctgcgatactttagggattaacactaaacctcctactctggattttctctggtgataactcccgaacaatcacgtaattacgaacgcctcgcagttgaagaggcattaaaaaaggcgaaacataatggtagaaatcaatggaatcggtgtgaacgcacaggcgggaagcgggacatcgtgggtcaaacgcgaaacgcaagatgatccccgctgcggacgtagcccgacactggcagaacgtgcgcgtaaactggttgacgaaatcaacgcgaaaatggtcgaagcatcccgcaaagacatttccgagtatgtcctgaaatatccgactaaacaatcatatacctttgatatgaaacgttttatcggtaagactatggatcaggaatgtaccgaaaaagcatatgcggatctgggtgaatggttggcggaagaagggtttactttcgatacacagcgcaaccgacaagctgcgttactcaataccttcgcgggttcgcgtcgtatccagaccaattttagcgatcctaagcgtgacggatatagcgatctgacttattacatcacctggtgaaaataattcgaaaaacttgttgacgggagttatgagtgtggtaatatagctcccgtagacaagacactaacccaaaaggaaaacatcatggaaatcaaattagtacctacttgcgctggctactgcttggcactgaatggtgtagcacacaacggtaaaggcttacgggctaacgttgaagcaatgctgaacgaactgggtgcggtttatgaatatgatgacgttgcaaccagcgttaaaatcataagccttgaaaaagatggtgttaactgtgcgggttggtgggattgctacatcgactatagcgacaaccgggtcttcttactgaccagcaactaaggatcgagcatgagtgaagcagaatatattgatagctggggtggctacgacgatgacgatgatgatttttgtggtcataatttacgtcgagaaactctaaggcttttgcaacaagcaaatgcgccgaagcaagtcaaaactcctgttaaatattccgatggttcgattcgaactgaaacggttgtcaaagaagtaaacgggcgtgtcattacgtccgagcggcagaaggacatcaaacaattgtacgatgttgcaaaagccgctaaagtaggaaccatgatcacctgtcctacgtgcaaagagttgcacaagaagacgacatatcataaggtgttctgctctaatggtaaaaaatccaggaaagactgtaagagtaaatactggaacacgatccatccagaacgtttggatcgtatcttttaaatcaaaacgtggagtacgtttaaatgaaaacttttaatgaactgaatagcctgatcacctcaactgattcctacaaagtgtcccactggttgcagtatccacaaggcactgatgcagcgatgttctatattgaatctcgcggtggtaagtttgatgaagtagtaaccgctggcgttaacttcgttgcgcgggttcttgctgaaccaattaccatgaaacaagttgagttggcacgggtactttaccgtaagcactttgggaaagagattttcaactacgaagggtggaagaagatcgcagaactgggttatgtccctgttactttccgtgcgatcccagaaggtacggttgttccggttaaaaatgccgttgcgactgtgtacgccgaacatgaattctcatggttggctgggtggctggagacaatgacgattcgcggtatctggtatccgtcatctgtagcaacgctatcgcgtgagtgtaaaaaggttctggctcattaccttgatatgacttctgacctgactggtgaagcatataacatcacactgggtacacgtctgcatgatttcggggcgcgtggcgcgacctctgctgaatctgcgggtattggtgggctggcacacctctataacttcatcgggactgataccgttgaaggtatgattatggcaatcagtctgtttgcggactatcaaactctgtttgatgaagttgaaaacgtcgaagcaatcggtgtttcaattccggctcgcgaacattcgactacgatttcctacggtaaagagaacgaagacgaagcatacaaaaacagcatcgaaatgttcggtacagggttctacgcttgtgtgtacgattcctgggactacaaaggcgctgtagatcgcatcgctgaatataaagagcaaatcattgctgctggtggtactctggttgttcgtcctgattccggtgatatgattgataacatcatgtacaccctgcgtaaactgggcgaaatcttcggttacaccgtaaacagcaaaggttacaaagttctgcataattcagttcgaatcatccagggcgacgagatccacgggcctgaaacaatcaaccgtgtgttaagttggatggaagcgaacaagtgggcgagtgagaacatcgcgttcggtatgggcggcggtttgctgcaagaagttacccgcgacactcaaaagtatgctgaaaaactgtgcgctatcctcgtgaatggtgtgtggaaaggcgtttacaaatgcccgaaaggttccgaatggaaacagagtaagaaaggtttgctgatgaccatcactaacggtgtggaattcaaaacaatcgacactctggaaactgagattcctgacgggtggcgtgatgcgatgattacgtattacgacaacggtgtattaaacacctccgatacagtaggggttatccgtgagcgagcaaggatttaatatccgcgccaacgataacggatcggtagtcttctacaacaatcagccccttgtcgctcgcaaggggcttttttgtaagttggtgggctacgggttcaagttggaacaggtggacaacgcgacactaaaagaggttgttcgaattgcttatctgttgaaagataaaaaagatgaacaccgtgctattgcaatgcttgagaaattaggcgaaaattattgcttcgtggtgaatcgtgggtataagtacgaaacgatcgccttatttgagaaaggacttggtgaattatgattaccacaatcaaagaaggggttgacctccatttaggcgactccgtaaagctgattaaacagcttgaatctggttctgttgacttgaccataacttcgcctccgtatgacaacttgcgccattataacggctctggtgatgtctggggtgaacacgtatggaaagagttgatatcggaactgtaccgcgttaccgcgcccggtggtgtggttgtgtgggttgtgggtgacgcgactatcaacggtagtgaaacgggtacatctttccgtcaagccttgtacgcgctcgaacaaggttttcggttgcatgatacgatgatctatcacaaaaccgctctaccgaagaaccataaccgatacgaacaggactttgaatacatgttcgtgtggacaaaaggcgcaccaaaaacattcaacccgatccgcattccgtgtaagttccctgaaaaggaaaccgcacgacaaaacagctacttttccgaaaccaacgaaaagaaccgttcagcccgttccggtaagaaacgtaaacctgttggcaaggataaaattaagggtaatatctggtattacgctgtagggcgaaatcactcaacgaaggacgagattgcattcaaacacccagcaatatttcctgaacaactggcagaagatcacattaaaacgtggacggttgaaggggacttggttcttgatatattctctggctctggtacagtgatgaaaatgtcgatactaaccaacagacggttcaaaggcttcgaactgatggagaattattatcacgattctattcttcgtgttcagccatacgttaacaatctggaatcttttctatgagttatttgggtgttatcccctatacaggcaacaaacagtcgctattacctgaactcttcaagctgttccccgaaagaagttcatacatgcgtttcattgattgtttttgcggtggccttagtgtgtcgttaaacgtccctaaacccgttctaagcaacgattacgataagacgctgattgatatgtatgagcgtcttaaaacgcttcctgacctgtctccggtgcgagaattgattgcatcgaagggtctggggaaagacaagaaagaagagtatttgaaattccgtgatgaatacaaccagaacaaagatccgttatggctctatgtcctgatcctgcattcattcagcaacgttaaccggacaaacgacaaaggcgacttcaacgctaatttcggatgccggacgctcaacgatgcaacagtaaaacgctttgaacatttcaaaaagaatgtgaaaggtattgagttttccagtggttcattccgtgacattgatatctgtgaaaatgatttcgtgtactgtgatccgccgtacctgatcaccgatgcagtgtataacaagttctggaacgaagatcgcgaacgcgagttatatgctttcctggatgaactacacagcgaaggaatcatgttcggactgtccaacgtgactcaccatgccggaaaacaaaatgatatcctgattgaatggatgcagaaataccgcgttcataatctggataaaaagtatctgttaggccagcataccgactcttacgagcaaaacaaaacgcaagaagtctacgtgtgcaactaccagaaacgcgacgtaaatacattccctttaacactgaacgatttaatgtaggttaacatgtttaaaatttatggctatatcccttctgtgtataactgcgctccatgcctgaactcaaagcgcttgctggacgcgaaaaaacatccgtatgagttcgtgtctgttgcggattccgtggaagacggtaaacctgtgctgaatgaagcggtgatcgacgaactcgaagccctggttggtacgcgccggatgactatgcctcagattttccatgacgggaaacacgtaggcggattcgaccaacttcgcgagtacgtccgcaccctgtaataaataatgacaccttactgaatggtgttattatgctgacgaaacgaattaccaaaaaagactacccgactatcaagcaagccctctttgaaaaacaaggtgggcgttgtgctctctgcaaacgtcctcttgagggagagatcgagaaacatcaccttgaccatgaccatgctttagacggcgaaaacgccggacgtgtgcgcggcctactgtgtaacctatgcaacggtacagaaggtattgtgaagcacaaattcaacagatccggtctggtgtcccgtgatgttgattacatccagtggttagagaacttgcttgcatatctgaaacaagactattccgaaaaccgtattcatgacaaattcataccagataaggtaaaatggttttcaagacttaccaaacctgatatgattgccgaaatggtttctatgggctttgaatacgcagacaaagacgaacgcaaagccttaaccgcaaaatatagaaagcaattaatgaaggcaacgaaatgaaagtagaaaaacgagacggcaaagccgttgattttgacaaagaaaaaatccgtattgctgtagaaaaagctggcgggactatgacggatgctgatgccgcaatcatgctggttcagtacaatcagatccgcgatggtagcgcaatgaagatcgcccgtatccaggaactcgttgaagaatccctgatgaaaacgaacccagcggtcgcccgtgcatacatcgaatatcgccacgatcgcgatattgcccgtgaacagaaaagtaagctgttcaaagatatctccggtatggtgaatctgtccaacaaagagatcaccaacgagaacgcgaacaaagacgcaagggtattcccgacacagcgcgatttgctggcgggtattgtagcgaagcatttcgcccgtaatcatatccttccgaaacatatcgtagaagcgcatgactccggcgacatccattatcacgatctggactatagcccgttcaccccttacactaactgctgtctggttgacctgaaaggtatgctggagaacggtttcaagatgggtaacgcggacattgaaccgcctaaatcgatcggtgttgctaccgctctcatggcgcagatcaccgcacagattgcttctcaccagtacggcgggacaacctttgcgaatgttgataaagtgctggctccatacgctcgtatgacgtatgaaaaacacgaaaaaaccgcaaggaaatacggtatttctggcgatcgtacatacgcgatggaaaagactgaaaaagatgtttttgatgcgttccagtcttacgaatatgaagttaacaccctacatactgccaatggtcaaaccccattcgttaccatcactttcggtactggtacgggtatgtttgaacgaatgatccagaaagcgattctgaaaaaccgtattcgcggcctgggtaaagagggtatcactccggtattccctaaactggttatgttcatggaaaaaggaatcaaccttgatccagaggatcgcaactatgacatcaaacaactggctctggaatgtgcttctaaacgcatgtacccagatatcattagttcggctaataaccgcgctattactggttctagcgttcctgtatctcctatgggttgtcgcagtttccttagcgtgtggcatgatgataacggtaatgaagttctggatggacgtaataacctgggtgtggtgacaatcaacctcccacgcatcgctattgaagcggaagcacaggaaaacgaagacgcacacgacgcattctggcgcatccttgatgaacgtctggaactgtgttttgaagccctgatgactcgtatcgaaagcctacgcggtgttaaagccagtgttgcgccgatcctatacacagaaggtgcttttggtgtccgactgaaaccggatgatgaaattctggaactgttcaaaaatgggcgtagctctatcagtctgggttatatcggactgcatgaaacgctgttgatgtttggttcaggccaacacccatttgatcgtatcggctcccagaaattaggccgattgatcattgaatatctccgcgctgcaaccgaagcatggaagaagaaaacaggatatggattcagtctgtattcaacccctgcggaatctctttgccatcgcttctgtaagctggactttgagaagttcggaagcgtcaaaggtgtcacggataaaggctggtacacaaacagtttccatctggacgttgaccgcaaggtaacaccgttcgagaaaatcgactatgaagccgattatcattacatcgctactgctggtcatatcagttatgttgaattccctgatatgaaaaacaacctgcaagccctggaaaaagtctgggattatgcgatggaaaaactggactacttcggaactaaccttccggtcgataagtgctttgtatgtggctctgatgacgagttcacgcctacagaagaaggtttccactgtaagcactgcggtaatcacgatccggctaaaatgagcgtcacgcgccgtacatgcggttatttgggtgctcctgctgtccgtggattcaacgaaggtaagaacaaagaaatgatgcaccgaactaagcatcaaaattaatcaaaaagccccttgcgaaagtgaggggcttttgttatattgcacataccgaaactatgaggtattgaaaaatgatgtactggacaaaagactattttgaatttcgcgatgaagaaagttttgggactgtataccgcaatttagctttgcgtggtagtcctctgtcgcctaatcaactttcatctgtcgtgtttcctatcaaggtaacgcactgcgatcggaaaggtgtcaatgggattgttgatgccaatggcacaacatggtattccgaagattcttatctgtttgataacgaggatcgcggattctttaaaaagtttgtcgcgcttaaacctgctgttgaaaaagccgacgcgcaacaactgctggattgttctcacctgctggggcgaatttacgtagatggtaagctggtgacgaaacctggcgatctggaaaaattcttgcgtaaggcgcgggaaactaccctgaaagacaccgaaaaacgttatgatactgcaaccgccaatctacatcgtttgtctggtgaactgaaagttctacggggtgaatgatgtttccattaaaggcgcgggttcgcaacaaaaccggaacacaagaatggatggagtgtttacgcgaaactaagaactactacatttcacaggctgtaggctatgacggaaagaacatccgttataacaaagtaggcggtaaacgtgtggggatggaacaatatctccaattagaaaccgtccggcctgtgaatgttcctttcgatcttaaacgaccaaacggaaagccaacgatatgatcgggaaaatccttgatactttgtttcccttccgtgtacgcgcacgggtagaacgggaaaaccgactcgaagaaatccggttcaataagttccttgaggacaaaaagaagcgcgaagacgagaaacacccaaacgcggtaatggctgagggtgtatcgaaatgttctgttgggcggttctgggttgaaaaggattatcttgatctgataggtgcaattgcccctggcgttacgctggaggacttctcccgcgctactgggcgttcgtatactggttgtatcaaccgcttgcgtatgctctctatagtggtgcgtagtgcgcatttcggctatcgtgacgttatccgtccggtgatcccagtaagcagattaaaattttacatggcgggtggaaaaagacttgacttaaccaacgaactatgtaaaatcggttatatcagagaggggaaagttgttaaagcccctgaatggttcaccaatcaattcgaaatcaaataaggcaaaattatgttcaagaaactcgtatcgttcgtgactggtaaagttgaaactgcaatcgaacaaaacacttccccagaagaagcatggcgcagtgctgcacgtatcctgatcaaagagatcgaccgtctgcaacatactcgcgtttctgctgttcaggaaatcgcgaagctgaaaaagaaagttaccgaacacaaaaaccttcacactggtaaagaatcagagatcaaaaaactgctggcggcggggcaggaagtgtccaacagtcattacgtgctggcgctgcaacaccgtaacatctggcagggcttacagacgaagatcgaagaactggaagggatgaacaaagagattgatctctctgtcgtcgaactggatcgcaaactggctgatgtcaaaatcaacctggagatcatcgaactgaacaagcaaaccgaaagtctgggtctgactgtaccggaagacgtgatcgccgctgtaggccacacttccgtaagcgtcgataccatcgtgacgaagattgatgtgttgctgggtggcaaaaatgccgcttccgtaacctccgctgacgttagcgcttacatcgactccctgaacgcgaaataagaggaaggggcgaaagccccttttttgctatgtacgattacactattgaacgtgatcgcggtgaagaatggttgatttctcgtgcgagaaacttctatgttaaacttcctaaaaactttcatactttaccgaatgatgatactgatcgcttattgaggattcttgtagatgggaatgttccacagcgcgtttttcaggaaatggttgaacatgcgtgttctgaatgggataaaaagtattgcgaagaactgacgcatgatagtatagtaaacagcaacctaaaagacgcttacgaacgaagaagtgtgtacgacatttacgaaaaagagaggaaaagtgaaatgatgttcgaagacggcaacagtgcattcaaaccagcacgtaaaacttatccagactggcgcaaacagtacgcagaacagctatggcacattgacattcccgaagcgctcatgaaagcgattagccctgcggttgactactattcaggctggaaagatgaatatgagttagaagtcggttcgtttaaggcgcacgtcatcaaagcgaccagaattcttgatttcgttgaagctgttgcgtcatgtgatatcgttgaagatattcgtattccttcaatcaacgtttcgcggtatagttctccgggtaacattcgcggggatcgttatgcgaacctggcaagcactacggataagctgaacttccataaaatcaatgaaaaaggatttgatggttgtgttctgatctcaatggtggttgtcacgacacaaggcgagtacaaactgatcattgattgtgacaaagcggctcgtgcaattcccacaatcaaacaatgctttggtgaagatttcaaagtattgatgaaagcccgtgcgatggaaaagttcatccattcgtgcaaaaagaacgtgctggagaagtatgatccggcgctcacatacaccaaaattgataaagatctggtaggtgatttatgctgattaacaaagcgcagtgcaaagcgataaactttcttctgcacgaactgattgaaaacggtatcaaatttgaattcgttgatccgattaacggtgatgatcgtcatctgctccgctgggtgtctggtagcaatccgctggattcagtatcccaggttgtagagtctgcgcataacaatatgccttgtcgtgttctgttgggtagcgttaacgcctccacatggaatggatctgatgcttattatgtcggattcaaaaaagagttgacggacgacgaatgatgttataatatgcccctgtagacaacaaactataggggctaaatcatgaaaatcaaaaatactgctactgaaaatctttgtaacgaaatcgcggtgacttactggaaagaaggtcacgtaaaagcaatgaaggattttcaacagtggtgtgatacccagaagttagccaactgggaatacgccgtaatcgtggaacggatcaaagaactgatccttgagaagaaaggcactataaaatgattcaactgaaattagacacacaggcgctgaacaacctgttcccagaaggaacacaagcgcgaatggatctgcaagccgctgtcatcaagaacgttgttgacagcgttatcggtaagcgcgtaaccgaagaaatcgaaaacatggtgatcaagcacgtcaatttgatgatgccagccaatcacgaaatcgaaaagattgtgcataaagagtttgctgattacattcagaaacgttacgcatacagcaatgttttcgatatcaattcaggcggtatccgccagatcaaagaactgatcacgacaaacgttaaaaaacagtgcgccgacctgctggattcaatcaagctggaagcaatcaacgatgcaaccggaaacctcaaagcggacgaagaagcgtttattgctcgcgtaaccaaaaacctcgaagtaacggttcgtcaggaaatcgttaagcgcgtgaataatgaattcccgcaaattatcgacgaagcgatcaaagcccgtctgttcccagaggcgaaaggctgatgaactttgaccgcatctataacatggatgtggttaacggtaaaggaatccgtgtagtgttgttcgtgactggctgcaatcataaatgcgaaggttgctacaacaaatcaacatggaatccccgcaacggtacaccatacaccgaagagactgaaaacgagttgattaaactcctttcaaatccccatgtggacgggttgacgcttacaggcggcgatccgttttaccgcaccaatcatccgacgctcttaaaactgctccagcgcgtccgtgcgacgttccctgataaagatgtgtgggtttggacgggttacaccctcgaagccttacagggcgatacagaacgctctaagctgttaccattcattgatgttctgatcgatggacggtacgaaaaggatctaccgactaagaaaccgtttcgcggttcggataatcagcgaatgattgagttcaaaaagaattccatcgaaattaaaaatatcgcttgacctggttggtagttctgttaagatatccacatcgaaacaaacttgaggacgagaaaatgaaaaacgcaatcatcaaagaaatctgtgaactggttgatgtgtatggttggagtttgggcgctgcaaaagcagaagccaaatctcgtctggaagttgtaatcaaagcccgtagcaaagatgaatttgttactaaattgcaagccctctatgagagataatatcatgatcctgaatttcaaaacccgtaaagaagcccgtgactattgctggaagtggtcgatcccgctgaaaaacatcaccaaaggaagcggttcacatccgtggacggtgagaacaaaagaaacccgcttcgaaactggtaaagattacaagctggttgatgtcgaaggtttcactgacaacggcaaaaacattgcgaacagtgttcaatcaaaacagatccaccaattgctgaacggtgttgtaaacatcgcaagccgtaacggtgatcgctataccttcgatgctccggcaggtgttgctatgaacacccttcgtgcatgggaagcgaaatacttcacagaagttgctccggctaaagccccagcgccaaaacgcgctaaaaagccaaaaccagtaggcaaaccgtccgtttctcctgcaccagctaaaccagatctggattcagaactcgacggtggcgttaacctcgctccgacaatcgaaccagttgcgaaacctgttgcaccacagccagcaacggttgaagcgatgcctggtaactttgttgcaaaccgtccgtatgttctggtagatgtagatggtttcctgcgctctcataccgcgaataaacgcattgtgcaacacatcaaaaataacaacggagttctggtgtttgaatccgttgatggtgacggcgacgcggtgatttataaagatcgtagcctcccgtttgtaatgcatcgtgagcgtaagttcttccgtgaactcggtactggcacagttcaggcagataccccagcggttcagactgttgacattgccaaacagcaacgcgataaagagatcatcgaagctgcacaggcagtagaagacgcgctggcagaacaccagaaagcgatcgaagttgttgcgcagaaagctcgcgcagttcgtgaagccgccgcaaaacttgcattgctggaaagtaagtaatataattcgggggtgcttacggcatccccttttttatttgaggtaatcatggaattattcgctggaaaaacttacggtttaaccgtatcccctgaaatctttgcagagaaaacctggaaaacaggtatcgcaaacatcattcgtgaaaaaggttatgtgacgattgatcgtacctcaatcggtgagtttgaagatcgcgcgtttatcatggacggcggctacgaatatgaactccctgcatcattatggaaatggttcaaggaagtaacgccggaagatggtgaattcaccccagaagaacccgaagaggttaatctcggtaaaggggttgaggctgaaaacggtatgcgtatcgcaacgccggaagaggtttccgctggtgttaccggatcggatctgtgcctgatggatatccctaaattcacgtatcgccctgtacaggaaaaccctctgcgtgatctccgcatcgatccatcattcggggctaacctggaaacgttgagcatcgcaccgatgccagtacgtaaatctgatgcaatgctgcgtttcgccttgcaacatgttttcagtggtggtagcatctatcaaatcaacatggaatcagaactgaaaatgcaggaagaccagattgcaaacctgttcgatctgcacacccagttaaccgctgttgagaatatcgaaaaactgttaggcaaagagaaaaagcgcattcagcaagatctcaaaccatacgggaagaagaatgaaagtcgaaatatacggaatccccgaaagtcttcataactgttacgggtgtatacaagcacaaaaactgttgacagaaaaagggatagaatatacattttatcccgttctgaaagaagcgaaaaacgatctgggctttgaatacgatcgcccacgtatcgaagagttagcaaaacgggtaaggcaacgcagtttagcgtttcaatacccgcgtatttttgtcgataacaaacttatcggcggttatctgcaactgaaacaacttattggtgattaaatgagccgtgaaattttactccctgctgcaaatgctgttcatgctgaaacaatggaatacatggagaaattcgttgaacgcgataacaccgcgatcatcactcctactcacctggacgcgctcgaagatcgtcttcataagcagattaaagatcaatttcctgaaaaggttagccgcaacttcattcgtcaggaaatcgttgcaatgatgctgaaacattacggcgttgaaatcttcggtgtcgaaccactgaaaccgaagaaaccgcgtcaaatgcctaaacagatcaccgacgaagcaatcaagaaataccagaagaaatacgctaagaataaatgatctttaatacgattgaatgtgttccgtcaagtggtaaaacaaaggcgattctgaaccatatcaatcaaacgggcgaaaaagcaatcatcgcttcgatttccatgatgttatcaaaacagtcttatgactactacatcaaccaggtaaaagggaaacgagcggtgattgtggacacggatcaccgaaccaaaagaaccaacaatgacgcgctgcgtgaggttgtcaaagattatgatgtgatctttatcactcatgcagcactgaaaaacattgatgactttgatttgtataaagatttttctctgtacattgacgaagttcctgatttggttgcgttcgaaagtctgcgatttaatagcaatatcaagcacatacgcgagatttgcttgccgtttagttgcaatgccgatgatatcgttgatttaaaacttgacgaagaaaaacgagaactggttacacgattagcctatgatgggcttcgtaaacgtgatgatatcgcaatgaagatgttcccgctttaccgtgctctgttaggggctattccggtgaagatgcaatgtagcgattcgggatatgtctgttacttcgtagaggatcatgacgtaagccagtggaagttcaaaaatgtaaccattgcttcatccaacatcaaagacacgattacagggaagatcctgcaaacgtttcatgatgtggagttcaaagattcaccgcttcaaaagctggttgactttaagcaatacaaaaacactgggcgcatacatatacatgtgctcgcagagggggattattcgcgttatactggcgatctctctcaatctgggacgacagtatacacccagattaaaaaacgcgtggaggcgcttttagggggcgaacagttcatctactgcaccaacacgtatcgatcgaagtttagcgaggggcaagaaatcccgtacaactcgcacggattgaacttctattcaagttatactaacgtggtggcattattcagttacaacccgttaccctggcttcgtcaaatgttgcgagcggttgcggtgtcctctggactcgaagaggaagaattagttgatgcttatgttgtcagtaaatattacgaaccagcctttcagttatgcgctcgttctgatatccgacacaacaacagcaaacgaaagattaatttatttgtgcctgatatgcggttagcgaaatacatgaaggaaaaatattttcctgatgccattatcgaaaccacagaagcagttcaaacgaaaaggcaacgcaaatcatttcaaacccttttccaaatgacggacaaagagaaaaacgcttttacgccatacaagaaaagaaacaaattagattatgcgaatcctcttcatcacgcgattgttaaagattggctgaacaattaccgtgagaaaaaggcgacttgatggtcgccttttttgtttataaatatcagtattgaataagataaaggaaaacgataatggtagctaaatcattccgcgccacaagtggccttgatgctgctggcgaaaaagttatcaacgttggtaaagcatcacgctctgtgttgagcgacggcgtgaacgttgacttttttaacgaatttaacacgatccaacaatacgattctacccgtggttatgctgcgtttatggctatcatgtacgcgcgtcgtatttggtacgctcgcgcagatattccatcaccagcgggtgctttcgatgaaacaaaatggatctcaacccgtaacgatccaaaatgggtatataacaacgtaacgagcaatgacggtctccctgttgaatccggtacgtacttaatggctgacggtcgtttctctgaactgacctatattctgccagatgcccctgttgagggtgatattatcactattaaagatggtggtggtcttgcaggggttaacaacctgttagtgcgttcaaacacccgtcagatccgtttacgtgatattcagtcaagctcttatcgactgactcacccatatatgaccgttgcgtttatttttaacggcaacttatggcgtgttgctgaaatgcgtgataaccgtgattcgcagtttgttaatgcgactggtttaaccgctttccaaatgcaagcgggtatggtaacattccgtaacagtgggacgggtaaaattacgttgcagttgcctcgttacgcaaacgatggtgactcaatcacaacttacgatctggatcgccttgcttcggtgaacgttgcgactctgcaagtttatcctggtagcggacacacgatcagctatgacggtatcaataacgtaacctctgtgacttcacagcgttccggttatggtatcttcatgttcgatcaggctaataaccgttgggttgtttatgacggtgatcagcgcgttcgtctgcgtcgtatcagtgatgacctgaacatgttgcctaacgattacgtgttcatcactccgattgctggcaacccaccaactgtacgtaatgtaacgctgactcttccgcaagatgttgcagaaggtgatcgcgtatatatcagtatgtacatgatggggaaaacgcagaactgcacgatcaaagttaaagatggttccggtgaaaagatccgcaccaacaaaaacatgatgcagttcccacagcgtaaggattatccgcctaatgattggttcagtgttgacactctgactttcaatgccgatactgactatcttccatacatggaattgtcgtatctgaaagctacgaaagaatgggtagttgcacagtatcgcccgatcattgaacgtgtcgatccaacaaaccgttctcgtctgggtgtgattgcgctggctacacaggcagaagtaaacaagaaccatgaagatacgccgtctgatgaactggcagtaaccccgcgtacactggcgaataaaaccgctactgaaacgcgtcgtggtatcgctcgcctggcaacaactgcggaagttaaccagaacacgacagcaaccttccttgatgacgtgatcgtgacgcctaaaaagctgaacgaacgatcagcaacagaagatcgtcgtggggtgctggaaatcgcaactcaggcagaaacaaacgcgggtactgatgacactaccgcaatcacgcctaaaaagctcgatacgcgtcgtgcgagcgaaaccttagcaggtatcggaaaactcgttacaacgggcgctacgacagcggagggggctttacgtggggatgctggtacgaacgtctacaacttcaataacggtgttgaccttgtcaccccgaaatcattgaacgagaagacggcgaccgaaaagtcaaaaggtctggttgttctggcgactgaaaacgaagtggtaactggtgctgctgctggatctgcttcaatgccgatcgtagtaactcctgaaatgctgcatcgtaaaacgtctactgaatcgcgtatcggattgattgagatcgcaacccagacagaaacaaacacgggaactgatgatctccgtgctgtaacgcctaagaaactgaacgatcgcaaggctactgaatcgcttgatggtattattgccctcgctaccactgcggaagtttcagcaggtacggtaacgaataaggcagttgttccggttaagctgaaagagttcttcgacgttacgagtcatgttgcggttgcaactgctgatggtttaactcagtccggcactatctggacaacggttaacctggggattgcgtctgcgactgaaacacagcgtggtactttacgcgttgcgactcagggcgaaactgatgcaggtcttctggataccgtgttcattacgcctaaaaaactgcaagcgaagaaagcgacggataccgccgaaggtattattcgttgtgcgactaacgcggaagcgggtgcgggtactgctactaacctggcaattactccggctaccatgcagtttttgaacggtactgatccggcgtggggtgcaacaacaactcgacgtggtgcggtgtttatcactaccaaagcaaacactttcatcggtgataatctggttggttctactcaggccgttgacgattatctcgaagatttctatgctgtatcgcctcgcggtctgaactttgctctgcaaaacttcttaccgaaaatggcaacggcgcagaatagtttgagtctgggcggtgtggttgctgcaagctggatgcgtcgtgatgcaaaccagacggtaactggaaacaacacgtttaacggtacgagcaacttcgttggtaacgtaaccactaacggaacactgacggctaacgctgcggtaacggttaacaacaccgtaaccacgaacaataacattaaccagtctgcgaaagcaaacacggtgtatgctaatactgttctgagtggtgaggctgcgggaaccaaaaacctgcttcgtacattccgtggtggtgtgacggatacaatctggcatgaaactgttcaggcaagcacgtatcgcctggcgacgggcacaacggatctggttgacgttctgacagtaggtgatgtcggtaacggcacaatggcgtattccggtacgaacattcgtctgaatggtaaagctctggctaacatcaacacggcgggtgatttgtttgttgcgagtacagcaacgcctacggtacaattacgaaccgctgcaactaatggttggaacggtgtaacaatcagtaatgacggcggcacaaccactgcaaccgtgatcaacacccgaaactttacccagcatcttgacagtacctatgtcaacgtagcgggtgatactatgactggtgcgctgtcagttagcgtaaacggcacgggtggacgctttaccagtgtgagcggtacggcacatgttcaggcgggtgatttctctgggaacgtccagaaaatgcgcttaactggcattgacgataaggtattgactgagtttaacatcaatatcaccgattacaacaaagcgatgatcaacggaaacctgatctatcatgcaggtcgtaaaccaactccggcagaaatcggggcggtagcggtagcgggttcaaccgtcgatactctggttgtgcgtgactatatcaaaatcggtaacgtgaaaatcttcgcaaatccaacaactaagacttgtgaatttgtgtgggaggaataatttaaatggcgaataacgaatttatggcgttattcggccctgatagtttcacggcgaatgtgttttcagaagcaaacgccgtgaaatatcgccttgttgtccgtggaacgaataacgattctgcggtcaactcggttgaggtatctattaacggggctgatattataaacagacgaacacaagttgctcgcggaattaacctggctgtcattgatggaacaactttagcattattggattacaaagcattcgatatgtatggtgatcctgctacgaacgggaatgcgattaaagactacctgaattcacttccagcgaacagaattgtgtgtttttatactttcgatgctatcaaaagtgatgacaactttttagcaacaatgaggaaaattggttctgttgcatggcctgaaacacgattctttagtattccgacgacaacaaacagcaattcccaacgttcatcttattcagctatctattcatctacgatgaaaaagatctgtatggaaaactttgtgggtggttctggtacggggttgaaagacaatacaacgagttttgttgaagttgtgtttgatgaatttagtgatatcggggtaactggtattcctgaaagaatggttgatgatgtccagacataccagaacagcggggatatgtacggcttccatttatacggattgtggtcaatcggtaatgatgtttatctgggtgacaccttcaaatttactggggatctgtattgttcaaaagaacttcgtgatgctgggggagaagttcacctgtatatgtggacagaaaacggtagcggacaatggatcaaatcaaccattctcagaacaaccggattagcccctgatacatggcattcgttaacaggatatttcactattcctactgatgcggtaaatgctcgaatgggttcacaggtgtatcattatccgtcaactgtaaaagtcgggcttgctcagtgtcgaaatgtccaaattgctaaagtaccgcgcgaagaagtagatcgtaacggtgctgcgatcggtgtgaacggtatacgaatgcaaacactttccgaagtgactgcaacaggaacagaaaacccgattgaacaattgctttctctgcctgtttcgcctactggggttatcagtgacaagaagatcagttcgcataactttgctgaacttgattatattgtttctgatccggttgaatacacttcgacaaatacagcggagtaccagttcaaagaatggactgttacccagcaatcggcggtaacgaaagcatcactaagcagttatggcttaaaagctggtgatactatccgtatgcaatgccaaatgaaacgcgatgcgaatgcgattgctaacaataaaggcgcatatattgtaatgcagttctgggacgcgaataatacgtatatttcagggatcaacatgcgtgatgttggtacgatcccgaacgtatattcattctacaaaaacgaaggggttattcctgctggtgctgttacgtttgatttcggtttatatcgttatccaaacaacacaaacatcggtacggtatccgctaaagacgttaaactgtcaatcgtgagataaaggggcgaaagcccctttttcataaatacagtcattacaggagaaattttatggctgatttgaaattaggtacaacgctgggtggtgcgggtatctggagtgcttctaaccttcctctattgccctctggtggacaattaacgtataaaggctggagagtatacaccgaaaacgatcgtccgacagcggaggatataaacgccctctcgacgattaacggcggcacggttgcaaagaatactacattcagtcagaacgtgaatgtagggcaggtgttgacagcaaatgatattctttctaatactcgcgtacaaattgcaagaacaggcggtgcgggtgcaaacttaacatttcgtcgttatgacgttaccggaaccccttcttcggaaattggtatcatggatatcaacgtacacaacggttcaggtcagtttgttggtgcatttaacgttaacgcacgtccagacggcggtaataaaatatacttccgtgcatacaaagacggaacacagaatacattattaactctggattcacaaacccaacaggtaacagttgagcaaggttctttccgtgtaatcgggacttctaacctcggcttaacgaatgctacatcaatggcagttagcggtgcgattactgcgaatacagtaaccccgacaaactgggctaaccatgatgaacgatatatgacgggcattcctcgcggtatgtctggaacaagtttcggtgctgctgttgtaactgaaaagaacgatgttctgtcagtaggcggtaacatcaccgatggcccatatggtaacactacgtattacggacaggttgttaactatcgtcgtacactgaatagtggggtttcattagttcaaacatacttcgggaacgaaatgtggtttcgtcttggaacaggttctccgggcgcgtggtcgtggaaccagggcgatgctaatggttggcggcgtgtttatgatacggtcagtccaccaactccggcagaagtgggggcagtaaacaaagctggtgatacaatgactggtggtttagcgttacttggggatttgaccttccgaaatttggtaaatcgtcatattcgtttcgaatacaccaaaaacgacggttctaccgctgttgacgcttatatctataaagatggtgtagatagccctactcgtcgtgctggacttcgcattaactgtgccacaccgaacaaagcgagcgggaatacttcaaactcaggtgattttatattcggggagaatggtaactttacactacctggtggcggtatgattgttcaggacggattgaaccagggtgtttattgtatgagtgcattaagcacaaccgcaagtggatctaagaactacttacgtaaattccgtggtggtaatagcgacacgatctggcatgaaactgttcagggcggtacgttgcgttgggctactggcaacactgatgcacaggaatgtatgcgccttgatggaacaagtttagtagttcaaggaaacatcacgtcaggaaacaatttcttggctggtggtatcatgcaaacgaacggcggttctttgtatatccgaagctctggcggtactcatacgtggtatcaagaaccagacggttctgaacgtgctgttacatggtctgatagttctggtatctatcgaatccgttcaaacaatagcaaggctgctacatgggaatttaagaatggtatgatctattattctaccccagtaaacggaagtgaccacggtttgattcgaggtgttgttgatgctggcggttgggatcaatggactgctcgatctgctggtattctgctggatgtgccaaatatccataccagtgcttataatatctggaaagtgacgaagtggggaacctctcatgttgctgcgatggatattcaccgtcctagcgatagtgattcacagacgcgagttcgtattattacaaactccggtgcgtacttctactttaacggttctggtgaatttactgcatctggtaacggtagctttaacgatgtttatattcgttctgatgaaaaactgaaaagtaatttcaataagattgaaaatgcattagataaagttgaactgttgaatggtatgatctacgataaagcggatcatatcggtggtgaacctacttcccgtgaagctggtttgattgcgcaacaattacaatcagtattaccggaagctgttaaaactggcgaagatacagaaggaaatgaaatcttaactgtttctccgaccgctgcgatcgctttgttggttaacgcgattaaagaactccgtgaggaagtcagggaacttaaatcccgctaattaaaagcccttcggggctttttctttttataaatatcataaaagcatttgaggatctaataatggcagatttaaaagcgggtactaccgttggcggtaatactatctggagtcaggcgaacttgcctttgctcccttctggaaacacaatcacatataaaggctttaaaatctacaccgaaaacgataagccaacaaaggccgaaatcggattaggcaacgtaacgaacgatgcacaggtgaagaaagctggtgatacaatgcaaggaactttggaattacaaggttctgcaactgaattgaaattaccattcaggatcgcaatggttagggcaacagaaccgtatctcgttgcaactcgcacagacaataacccagtaacaaacgggtttcctagcgcagaaacacgcacatttgttatacattcaaaaaccacgtcaccaacgtcagatccaaacttgggggcaaaccttgttgatctgatttgtacccaacgccctgcgggtggtggtgcttattatatccgtgcttttggcgcaccaaacacgacaactggtgctgctggggctgtccgtgctgaattacaaatgttgggtgataatggtcttgttagtttaacggggacacaattcaacatcgggatgcaaaccgttgtcagtggcacgatctttggtgcgcaaatggctatcaaaggcgacggaaacaaaaacctgttcttccaggatgctggcggtaatgagcttagtttgatctatgctgatacaggaaagaacttatatgttcgtactggtggtggtgcatatgcaaccagatttgcatctgatggaactttagttctcgctaaccatctaaccgttcctggacaggctacgtttaacggtatgggtatattcaataaccgtgcttccgttgaaactgattatgctactcaaggagcaaacactgcaatacttcgagtaactacaaacggtgatggaaacggggttggtgatggtgttacccacttaggctataaagacagcaacggacgatataaccattatttccgtggtactggtgtaacgtatattaacaccaaattaggttttaacgtaaacgttccatcatattataatgatgttccccagggtacgccagcgcaatatttcttgcctactgttggacagggcgggaaaaactatttgcgtcagttccgaggcggtaacgcggacacaatctggcatgaaactgttcagggtggtgtgtggagactggcaacaggttctacagacggacaggaagaattgcagatttctactgcgggttatgctcgattccgtaacgaagttcaaagcgctacgtctggttctggtggacagttccgcgcggtacaaggaaactacggggtaatacaccgaaatgatggtggtaactactataccttgatcaccaactccggcgatccttatggaacatggaacagtttacgcccgattactatcagcttgactactggtattgtttctataggaaacggcgcgaacattaacggttctgttaactttggcaacgcggtaaacttcaacggaacggtcgaaacaaacggtattggttgtggtacgccaaacggattgggtacgactggtatttctctgggtgataacgatacaggtttcaaacaggaaggtgacggtattctcaacgcctatgcaaatagccagcgtattatgcgatggactactggtgcaactgctaactataaacagttacaggttcagggtgttaacgggccagcattacttctgaataacacagcgactaaccaatcgtgttatttgctgattactttggcaggtaacagcggcgcatacttcgggtttggtggtgctgatgataacgtatcggtacacaactaccgactgaatacgaccttacagttgcgtacttcggatctgtatatgaaccgtggtctgtatgttgaaggtaacgtaaacgccaacgatgtgtatattcgttccgatattcgactgaaatctaatttggttgaattgaaagattcattaagcaagattgaacagcttaaaggttatatctacgataagcaatcaaaagatgctgatgatatcgtataccatcgcgaatccggtctgatcgctcaggacgttgagaaggtattgccggaagcagtgcgcgaagacatcgacactggtatgttaaccatttcaccttcgggaattaacgcgcttctggttaacgcaatcaacgaactgcgtgaacgtctggaagcaatcgaaaacaaattaggggcttaattgcccctctttcatgaggtatttttatggctattgtaggagttcctggctggatcggttcgtctgcggtcacagaaacagggcaacggtggatgtctgctgcgggtaacgcggttcgaatcggaacaccgttttatatgtctcgaatggcgggacaatccgtatataacatcaactttacggtgtatgagcgttactataacaacgcccgttatcgtggtcagtggggggttggttggtattcaccatattcgaaaccttccggtcacggcgcagttggtggtagttttaacggcaacgcattcggtacttgtgtttctgcacaattcagcaatgagattagcgtaattaccattcaaaacggtcctgctgttaacctaagacttacgatggatgacggcggtgtgtttgactttgacaataacggtcgtatacaggatggatatcgccaatatcagattgcttctgcccaacataacgcgtggtatgactatttgaacgcccgtgtaggccaaacacgatccggtctggtcactcaacgttaagtaaattcctaaatatgttcggggtcggcatccccgaacttgaggattaaatatggcgctattacaagataaattggcggtgcttgaacgggtaatatcgttcatcatggcggtcaaaacatggaaacagttattcattaaattggttcttatcgtcactattttcattatgttcgtaacatggtataagtgggatgacttattttcagtctggaaaacatcttcaagcgttatagacgtgccgacgatggagattgaaaaggcaaaaaagtttgaatccgcatccatcgaacagttaaacatagtgcatttaactacgggtgcggatttttcggcaatctttgggttcagacctaagaatgtcaattattttgttgatataattgcgtatgaagggaagttaccgcaacagattaacccgaaaaatctgggtggctatcctatagacaagacatcggaagagtataatagacatataaacgggctgtactatatctcagatattgccagcccgtatcttccaacaaaagaccttgttccggtagcatatacctttagttgtccttacttcaatctcgaaaactactattcaggatcaattctaatggaatggtatatacagaagcccgaagtcgccgatacgaagttaatgatcgtgtgcaatcaggccgctagaattttaggcaggattcgatgataatttcagtttcaaactactcaaagcccgattgatgaaatcttttactttcgtcatcgggcttttatcgtatatgtcccatacgcgcatgagttcgtaaggtgtcggaacatattcatcgttccagtatccaacattacctatcgtaatgcgccggaaaccagcctctacgctgtgatatacaaagaacccagccttacccacaggggcgactttaaaaccgcgtgtagcggctttcatggcttcgtcgtgtgtcatgatagaatcacttcgcctctgtattgattgtgatagatgtatggacgaacacccagtgggtgattatctatgactaagatcaggtcaagttcgtcgtggttatcatcttctgcaactatatcccagtcggtcgctttctgttcttcaacactggcaatgaatacctggttaatctcaaccttacggtgagaacggcgaatgatcgtatccccttcgcggaacacgatcatatctgggttaatcgggcggtacgcggttttacccgcgcacacttcattaagcatttcttcgtatgtcattataatacctttactcgctgaacgattgtttgtttaacttctttgtattcgttgtgaagtttaggtgtcgctttgaagcgaatcacatcaccctcttcaacaattttgtttccgtagtagataaccacgttaccatctacgttgattttggtcatgaaacgttccacttcggtgtaataagaaacttgggtatatccgagagaaatcactttctcaacaaccccgctcatttccatacgcttaccgatttccccgatgtgctgcgctgctgcgatcttcgcctggcgctctgcttcccattctgcgcggatctcttcacgtttagcgatgtaatccttctccagcgctacgcccatgcagtaagagcaaatagcctgaaatactgggctatcgttgccgttttctttgcactgatcagcccaccacagaatcgtatacatcggcatatcagcaatcacttcacctttacgcttaccgatcggcatgatgccttgttccagcagttccagattttcggtatcttgtacagacagtttgccgcgacgttcgaacagatcgaaatctgcgaagccctggaacaccatctggaaagtatcggtctggttcagacgatccaccatgcgatcgaagtattcacgcgctttcgcttccgctttatctgggtcagtagacaggttgcagatatagttatcagaagtgaatccacctccacgacgctctacacgcagagtgtacatagcgtttttagcgccagaagaaatgaagtatgtcgcggtaactttagtcaggttagtcatggtgaatctccttagtggtttcgtttcgacaaggccaatatagcaaaagccctcaaccgaagtcaagggcttttttatcatgcgttcgaatctttcataactttatgaagatggatatcaaaaattttccagtatgcttttccgcgaggataaatttttgctttatcaatgtcttcgttgcttccccatgtattgtttgggttacgacaacgattttttgcataatccatgtgccagaataagcgttgcaccgatgaatctgtgcctaatggatcttctttgctgaacagaatttgtgaactcataagaagaaacctgttcgaactactaaatcaatctgtttttccggtatcagtggcgctttatcgtcaacgttgcactgataatacatcccgacatactcatgaggaacgttggattcgctcgcccatttcaggttgtcgtctgtacgcggccctaacatgaggttaacgatattgacagcgtgatcctgttctggggtgttgttgcatccgttcacataatgcccgtgagcggttttgaggatttcaatgatatcttcgtcggcttcaacgagatacagccccgtgttttctgggatttcctcaagaataatcaaagcggttttcatcacacttacctttatgtttctgcttacgttttgcttctttaagtgctcgcttgcgatcgcggtgagtagaagcgcggttgaaatcatgttttgctaccagattgttcatttaaagcccctcaaaaagaaatatttaaggggctttcgcccctcgaattaatccagcagtttgcggatcttatccgcgatacgtccggcgcgggttgcgcttgcggtgtgatcgctttctttggtagccagttcagccagcttacgctgatgttcttcttccgctgctttgcggtctgctgctacctgttcgacctgcttctgatcatgcgcaatacgcgcttcgagttcggtcagggttttgtcaaaagttgctacgatttcgtctacagaacggattttggaaaacagtttcatattcattatctcaattagtatggttggaattcaaagtcaaacagatcatttagtgcgcggttgtattcagtatagttctcaccatccccgaaccgcatctgaatcgcgctttccgctattgtaccagtaagattcgagaaaccaaagaggtttttaatcttatcgtgtgcaacgaagtacagagaagcactatccagcaaggccaccatcgctgatggttcatgttcgcggcgtttgatgcgtaacagagtacggtttgcgccagtcttacggcgttgatttggggctacgtagaatcgaaatactaccttacccgttttatcatcaactaccaggtagaagccgtgttctttcaggtcaaccccttcgaacttggtgaagtcaccgcgcttcatgtcacctatcttaacagcatatttgtggatgtcaagccttgtcagaattcttttcatttttcttcaccagtttatttcctaatttggtgtttacaccagttttcatattcattgtcagtaccagcaagaagatagggcatgacaaaatcaagatcgttgcgccgaacactaagcgaactaagcgaatcaacaacgtcccgatccatttcatcggtatctctacccacttctgaaccgttgcgagtaccagcataacataacccagattaaatgcaagggctgttgcgataataccgtaaggttttttgaagtatgtctgttctccgtcttctgtacgtccagcggtaacgttgcctccgttccagagttctttggcggttttaatggctgtttctgccccgctcaagttctgccagtagtcaggaatgctctgtaggaatttcataatcgaatcctccgcgcctgaatcgctccaggcgctgttttggggttagtagtgactgaatcccacagttacatcacgcatcacctgataacggcatacacgcatcttagcgttgtcgtaatctgtcgggattgctacaacatcgcgaggattaaccttgacctgaataactttcccgcgtcctccgccatagtgaggcaggtacgattttgcggcaacatgcaaaccgcatgaacaggttcggtttttattctcgtctacctggttacgtggcatttcaaccacaacaccaggggaattatcgaacttaccggaagccagatcgcggaagtcttcacgaacacgtttccacgcgtagaaatctccatcatctgccagttcgatatcgttatgcaccatgaacccgtaaagctgatacacagcatcgcgtgaagggttttccatcaacttctcgaagaagttcaccaggtgctcgtaagggcgatcgttgtacatttcgcgaacgatacgttgtgtgataccgctgtcaaacacgatatctttgtacaggactttatgcccgatgattttaatgttgcctttgctgtaaatcttcaacgcttgcgttgtgtccaacagggtagcaactccctcgatgtcgcccttaaccattaaagcatgtgctttttcgaagttagggtgtgacgaatccgctgtgatgatcttgccgtccagtaccagagtaatgaacgattcagaaccaatcattttagatttgacatctgtttgtggaagtggtttcgatgcttccgtattatacttagaatgttgttcggtaataacgcgcccgatggttcggacgcttacaccaaattgtttagccagtgcggttttgttcgcgctggtcagaaagccctcatagacagctttcttttgtacatcatcaaggatcttaacgtttctcattatttccaccgtataaggttaatcaggttcgtcttgatcttatcgtccgtaatcatggtacggcctaaagagtaagacgaattgcgcaacacatacaccaatgcagggttgcgttcttcaaacaaatcaaaggcggtatcaacacgttctttcatatctttcagcattttgtaatgcttcaccgacatttcacgaagtaacggattgcgcaccacatttttcgatttgtttttgttctcgatagtatcgtaggtaaacttaccatcaagataatcaagcaacaaatacaattctggattatagcggtttttcaccatgcgatcaagagtcacctccagataatcgcgaagggttcgaacctcgctaccatgtttagacgaaatccaggctggataccagttaggcttcatctttttcaccgcgtcggcaaaacgctgtaccagatagtcatcaagacatttcatgttgctatcaggaatgcggctccacagggagtttcgcagaaccatcacgcctttcagtccggtaactttcaacagggtcatcatactgctggcgatgctacccagtgtatagttcggtgcttctccgtccagtcggctatattcatcaatcccgtagaggcgcatagcgtacatttcatccagtttcacgaactgtgcttttgtcaggaacagatcgtttttctgtaagttaccctgatcatcaaggaagtaatgatatgccgtaggcgttttcggacgtggttcagaatcaccagaagatgattcacgcgttgctttccagcgattgcgatcttcggtgtacgtttcgaattctttggtcaattcactggttttcagtgtaacgatctcagattcatcgaaatagccagtttcaatcaactgacgcacagagtcacttttacgatcggcagttacgaaactgatacgatccgaaccgttcatcatgcagtaaccgatcagatacgggcggagtgaacgcgcttcgttatcattttcaacgatgaacagtttcttctgtcgccacggttggatcatgcgcataacgtcctggcgtttggtggtttccgctttatacttctcataacggcgaccagaacccacacgttcgaatacgcaatctttcccgtcatatgggttagcccagaagccccacacatattttccggttgctgtatcagggcttttgatacgcgtcagaatttcagccagcgattctttacccacacggaaacggttatcacgggttacgaatgtctgtaacaagctaggcagattattgaaccatacgagtttatcgcgggttgtcttctgctttttatactgttccatcaactcttcatcaaagcgtttgttgattttatccagtcgatccgtaatcactttcttcgtgactttatcaaggctcaactcttcacgcgacggcatgaagtccagcgatcccagagggaaatccagaatatatgcgtaattgctgttacggtagcagtagaacagcgagttttcgaacatatccagatcgattggataacaaatgttacccatacgcgcgtatacgcctgaatagttgatggacttataacggatgatcccgcgatcgtctgcttctttcggttgccagtttacatcaacctgaacaccgataaagcgcggacggatacccgtaaacggttcataaacacgcgccgcttcacgttcccattctgcgatatcttcgactttaaccggaacggtgatttgaacgccgttaggttcgtctgtttcggtttcgtagatttggtcaacgaaaggttcaccattatccatataagccgtgtacgcacgtttaacgccgtcctggatggattcgatagtgaatgtttcggtgtagcagaacggggatttactacccagtcccagcgccccgatcagttcgtcggtgtcggttttggtggattcgaaataggttgcaaacacctctttaaccatccagtcacttaaccctgtgccgtaatcacggacgatgaaacgcggatcgagaacagttggtaactgaacatcgaacgggttcatgttacccgctaccatatgaccatcaatggcgttactggagatttcgcgaatgattgcgcggatcttgtatttgtaaatggttgatgacatgattttgtatgttttcgcactggtagccattttaaacttcgtgcgttcgcctttatcgaagcccgtagtgtgaatggtttgtggtgctaactgacgcaatttcattgtttatatctcacttggtgttaaagatgatgttatcgcatgaatatttcacaggcttttgatcaagcccatattcaacaggtgtacacatccggtcaaggtattcgtaaacctgttgcttctgacgttcgcggtctttcatatccatgataccgaccacgatagcagttacaaaacatattgcaatagtacacagcacagctattgtaatatattttcccgtttttggtgcatcatatggtttcattgaatcgcctctgcatattgttctggtgtcaatttacgcgctactaagcgccctttggttgctcttttgtttcctgaaatgtagatgttcgcaaggttgcgtttaccttcctggatctcattgtacatcttttcaggcatattgcactgataaacttcgccgttcggagttttcaggaacaaagcatacatatcctttttgctttcccgaatcactgatttctcacggatacggcttttacatggtgtaggctgtgcgcccaactcgatagctttacgctgccatacgatcccgtgtccagccccttcggtcagagcatgtgcaatttcgtgcatgagagtatctaaaacgttctcgtagatatcttccttaacgtgagaacggcttaattcaattgacttgcgactgtaattgcattgtcccagagtacgcttgaaacgtccgttaattttgaaagaccaatgagataagccatgcttcgccatgatgcttttggcccagatggttatttccatatcgctacgagttttgaacattttatatcctccccaatcagtgaggacactatagcaaaaaagcctcccgcgatgcaagaggctttttgtaaattatttcaatttcttcgaaagttctttcaaatcattgagatattcagttttcggggttgtttcttcccagtatttcagttgcttacgcagttcgttcgcttcgtcttccagcttttgacgttcatccgtggttagatgatagatgttcatcgcaaccaggatttcggcgtggttctcgcaacccgtccacgtagagacaagtttaaccgcttcgctgcgactaagccccttcaatgcgtcaggctgtgcgatcatctggtcaatgaagtccaccttcgccagcgccttatctaacgcttccttagtctcctggatgcgcttatcaatacgctgttggtaaacaccaatacggatatcaacgaagtctttcagcaacgtttcaggacgctcgtatgaatgcagtttcccgttaaagataacgttgatgttcgggtttgagttctcaatcaatccgaaatctttcaggatcttctcacgggtaagcccgtttgcgtactcacgtttaagggtgatttcgtagcggaaatcttctttcgatagatccttatagcttacgatataccctttttcttccagcttatccagaatagagatatatttcacgcgatcatacttgaccggaatctctgtgatcaccagtttggttttaccctggagttcgtacttgccgtacatcgtaccgttttcaatgtcgcctttgaaatgcgggtatttcagatccagcgtgaaatctttcccgttcaggtaactaacacatccattcagaaccgaaatcggatcgtgtggtggaatgttggtagcgtatgctttcgcgatcccgctgaacccgttaaccagtaccatcggaatgattggcaggtaataggctggcggtacgtgttcaggatcttcatgcgggattgtcaaatcttcatccatgtagatagccttgaacagcggagacagcttacatttaatgtaacgcggtgcgcctggctttttaaccagacgggaaccaaagaacccatcgcggtcaaaaagcgggatgttattgcaccagtgcgccgccataagagacaatgcctcttcaacggatgtttccccgtggtgataaccatacattgcaacaccgccagcgatagaggctactttctggaagcctgtaccgcctttcgctgcggaatgcacgaagaaacggtgaacgggtttgaacccgtctaccaggtgcgggatcgcacgagaataaattgtgtaaagggcaaacgtaagcccttctacctgtacaacgtctttaatacttctttccatcatttcaccgaaaatttatgttttccgttcacccagtctttacgcggatcggattcatcaccgaaacacagttccagaacgtctttgtattcgtcgcccagtacgattgtatcgtattttaactggtcgcccaacacccgatcgtaatcttctttgcgtaaagaacccagccctttgatatatcgtacctctttcgctttatcgcggaacggtgcgaaatcttcaagggagtagaaccatttttcatctttaccgactttcgcaatgataatcggtgtgcggatataacggatctttttcttctcgaacaactcaggccagcgactaaagaacgcaatcagtagggtgagaatatcgcccccatcaacgtccgcatcgaccatgatcccgatgttgtcgtaagtcatttcggaagagtcgcctggatggagattcaggatcgccatgagttcagacaattctttgtttttgagcacttctaagttactcattccccaggtgttcaacggtttgccacgtagcggaaatgcgccttgtgtctcttcgtttctgcactcgataaactgccctacagcggaatcgccctcggtcagaaacaaagtggtttctaccccgtcagtgtcgatccctgatgccggaacatgttttgcaaccttcgcctttttcgctttcttcttcgctttggtaatggctgcggcttctgctgcctgtttgcgaatcagagcggactcaatgatcggagtgattatttcagaagtatccataatctgtttcgcgatctttttgtagttcagtccggcgtggttgttgaactccccagcggtgttagtcagtttttctttcgtctgactatcaaaagctggtgcattgaagttatgcaaaaacacaaccaaagtcaagcattcttttacacgggctttcgggatctcgatagcgtgtgttttcttgatcatcggttcgagttcggaatagataccgtcgatcatggtgtcaacatgaacaccgccgtttttcgtatccaatccgttaacgaaggatttctgtttgaaaccgtcttctgtgctcgccaggatgaaactgattttgttgtttgtctgggtaatcgttttatcaccgtacatcgcgccatacatcgcgaatttgttcgggaggatatcaccgttatatgtgaatttaacggcagggaaagccactgcaagcgccataaggcgatctttgatgacttcctttgtctcttcgtcgataccgtccacaccgaaaatagagaagtcaggggtaaacttaacggttgtcccttgctccttcgtcgggctggtgcggtaatccatgttctgcgctccgtccgtacagttgatcgtgactttgcgtttaccgttggatgtctcaccgataaagattgcgctgtaacagtttgtcaggaaagaaccaacaccgttcatccccattgttacacggttttcgtcatcgaagttagaaccggatttagccattgtccaggctgcaacaggtttaggaacaatcttcccttctggcgttctcacgtcatcttgtggaataccgcgcccgttgtccgaaatagtaaccagattgtgatcaatcttgacttcgattttgttcgcaaatttgaaatcagttcggatcgcttcgtcgatggagttatccaggatttcgttgatgattttcaccaacccttcaacgtattccactttgcggaatttacccatgataaaacgttcatgggcttctttgttcactgaacccacgtacatgttcggacgtttgcgaatgtgatcgcgatcgctcaagcagaatgattcatccaccttagcgccctttgtcggggcttctggtgctttctgcggctcgttatcgtccattaagaaatctaaactcatattcacctctttattagttctcaggcattatatagggttctatgaaaaagaaaacccctttcggggtttacttgttgtacgggaaaccgtctttcaccatctgcggcttatcaaccgttcgtttcgcctcgcccccgcaatcacaatctttcggttcgtcacggctcgcgatgctggacatcttcgggaattctttttcgcacttggtgcatttataggtatatgttggcattaataaatctctgacaatggaataaaacggatcggggttgcggctttgctgaaaacacattgtttgttccctgcaaacatgagatcagtttcgtacaccatacagatatatccctgattctccaaaatttgccgctcccagctatcgaaccatttagacaacttctgcaatgaagagaagccgaaaatatagctacgataatttttaccatgttttttgaggttacgcattaaacgaaggtcttcgcatggtgcggggtgacgagtctcggagataccgaagtttaaaccgaactcgattccatgaatatcaagatactcatagagatcgtcttcatcaccaacacaacccgtgtacgggcctaattgcttacaccatccatcatatttggataatatagacgctttcaattcaacgcgataaaccaacatgatccgatcctcgtaattgattaactacaagtagagtaccacttatctaatttcttatcaagcagtttattgatcacttgcgcgatttctgttgtcccgtgggtagtacccagtttcaggtaaatcacatccaacgcacacacgatcgcatcaacgctttcttcgacgatatcaccgccgcgttgaggctgaacgagacattcggagatctccccaacctctgcggacaggtggtgaaccacgtcgctaacggttcgttttttgacgctatgagcggtcttgaaaaacttatccagaactacagcggaattttcgcgcggtacttcctcacctttattgacgtggttgatttcagtttccggttctggtgcaacccataccggattgaaaagccctttcatatcgttgaacttgataggaacgggaataccttcaagataaagaatccctgtttcttcatacaccatactgatccggcgtggtgaattgaagtccatcgggttcttacgcaacgcatcatacatacgacgaatcggatcggcttctgatgccatttgacacacagccattaaaatagatttcggggcgtacatatcaccaattttatacttgctcatttacaatacctttatgataaccaacaataaaacagttcacttctggacgttcgccagggaaatgcacacattgcatgacgcgttcagccatgagttcttcgcccaaataaacagaggtggtttcttcgttgtagtgacaacagtaagaagttttaacactcataccaggcaatccggcgatatgcataaactttgagttcgtgcatggtttaccctcaatgctctttccgtttacatcaaacgttgcaaacatttcggttttgctgttctttgggcgtctgctcatttattcacaacctcattatatgttttcaggttccattcatgcacttctggcactttggagtaatgatccaggaatactaactggacttgcataacactagcacgatccatattgaaaaggaagcgttgcggggaagtaatacacaggaaatcttcggtacttcctctgcttgcgctaaactcttttgtttctccgccgtcaaatttagcatatacaggcgtagaaaaatacggggcgaatagttcgcgtttggaatcgtccgtaatcgcactgaaacacacgtctacgagctttccggttccttcccgtctgatggtgagcattgtccctttcgtgcgccctaagacgtttacagagcgcgtagtgacatcaccaaaagcgtttgtgtaactcacagtctccacaaagcccatatcacgacgctgttgtagcattgcttcgtgttgtgcttctgcatcctgttctactactcgttgtgcggcttcatacgccgctttgttcggatctcttgattgccatgcgaagaataaaacccctgcggctatcagtccgaagattgaccaactggcggttgctgatagtttcattttaatttccaaaggggacgaagccccgattttagcgaagatagcgaacgtatccactccggtcgatcgcgttctctgggttgttgaagatgttaccacgaatacccttagcaggtgctttccagccagcggctttcaagatatttccgtcattgtcgatgaagccagcaactgaacgctgattgaacatttcacccgtttctttgttgcgggtatcctgcacgatacggtgatacttacggcctttttccagaacgaacacagtttcagtgtaatcgctgaaccacatgccagtgttacgacctttgtgcatcgcgtccagtaaaggctgtgctgcggctttcagttcgtcaaaagtatacatggtaaaatctcctaagtgtgtttcgtttcgatgtgtgtaatatactattatgcgttcaggattgcaagcattattttggttgttcgcaaatattgctcaatgcatcgcgtttaatgaacttcaatacacctgctttagcttctttctcgtcttttgcctgatacaagaagcagtcttcaccatttttagttttgacggtaatcacgaaagttttgtagttcatgcgtagttctccaggttagccagattttcttctgctttagcaagggatttttctgcggcttttttcactgctgcatactctttcttttcccatgctgcgatatcgctgttcatcttctcttcgcaataggcgatgatgcctttgttgtcgttgatctgctgaatcaggaatttgccgtgacctttgattaaagaaccgttctgcatcatgataactctccttccgtttcgtttcgatgggataactatatcaaagctatcccgtgaagtctttagcaaaaagtgctatttgttaaacccgtttcccttgataccatttcgggaaaataacccgctcgataaaagttctccccagattgaaactatcaccaaacaggaggacaccaaacaaagggtcgcgcttgatgtcgtttttcccgacagtcttcattttcccttcgtggatcacggtgtcacccaccgtgatatccttgatgcttacttttacatgatgcatacaatcacctctgcgagtttagcaggttttgcttctggtctaactttcaacgcatcattcagattcttttcaaccatcgctactgcgtcgttttcgttgaaaccgttcttaaccagggctttaactactttggcttctaagtttttcatgatgcgttccttttgtctgtttcgtttcgatgtgtgtaatatacaaaaaagcctcctgtattgcaagaggctagtttaacaaaaagtgctattttaatgatttaagtgttctacggattcccccgttttgggtgatatcgtaaagctcttttgctttggaaagagataccgtgatgtcataatcggttcccttctgtgagaatgagaatctaacctggtttagctccgtgtatacgtgggtacacactgcttccattcgaaaatgttttataaacgctttcttcgtgtagtagtcgctaaaccattctcttgctatggattggtcgattgctttgaagatgacaaacagcacaaccaacacaaaaattactataagtggaattgctgtgctcattattttcccctgttcacagattgacggtgtaacgcacggttaacgcgtggcgcttgataaggtttcattttgtacggtgttggatcagagtattcgatccggttaggtaatgaatacagttcaacgcttggttgaatccagcggattgagtcgattaacccttgagttaacgcacgaccgaaacctacaccaactaaacataaacgcataatatccccttactgtgccagaatgtgaagccattcgcccaaccacacgatcgcctgataagacaaccacaccgcaccggacacacaagcaatcacaccaatgatcgcgaatccgattaaaatgttcaaaccttctttcaaatcaccaaacatgttttatcctcttttgtttcagtccctacaaaataacaaagcccttgcacgaatgcaagggctttttatcataattcgactaactgaggcaatttcagaaccatccccggaaggatatagcttgcattgctaacggttttgcggttcaacttagcgatagactgccagcgctcaccacaaccgtataatttttcagcgattgaatacatgctatcgccaggctgaacaacatattcatcgtattcgactttaacgaacgcggggttcatgagaatgtcaaacatctgcgctttcgcttcgttcagtgtttttgcatgtacagttttacctacaaatgataatttaatcatcttttcctcggcagactcaatggatcggtttcttcttcacttgggggttcttccagccccagcgcatatctcaatgaatagactatcatcaaaacatctttcgcgcaatcgtgaattgaattatgcatcacaaaaccatcaagcaaccctttccgaagaggacaggtcgaagcatcacgcgttaacaggcggttttcgatacatgtacgcacatcgcgactattccagaacacggtcggcatatcttcgaagatgtcgatcttaccaaccatcttacgcacgatatcaaccaggataccgcgatcgaattcaggaccacgaacataatcgagtgattgccaacggctcacaccgtccgctttcaggtcttcaaagaattgtctgtgtcctgcatacagttccagatcttccggcgacggtttcaggatttgacgggcttcttcgctttgttgtttccaccaggcgattgttccctgatcagcaatacgatcaggctggttgcgcaaatcaaatttgtacttgcgcccccgtgcaaccagttccgcgaacgttggcgggttgtgaggatcgtcaacaaatggaacgtatgagagttcgatcaccttcccattcggggaagggccaaccgtttcataatcccatacgtaatctacgggtaaatgactcatgaagttctccgcttataatcttccatgaagtacgccagcgtaagcgcaacttctgggttgatatcaaaagtttcaaactctttgctttgcaaagtcatcataccgaactgacgcagaccggaatgataaattgccttttccagacggttcgcgttttcaacagcttctgtgaattcgtccaacacatcgcgatcgatgaaatgcggaagttcttgaacaggggttttgaaaattagatctgcaatcgcttccgcgtggaggcgtgggatctggatagatatatcttttttcatgatattaatgtccatatgtctttatcttcacgaatgtttcgtgccattcgaaggatcagcacgataacgccatattcatcataagtcagttcaatttcttttgcaataggagaccatgaataacttggcccgttcggagaatacagaacatcgttagatttttcaatgaagcgcaaacggtgaataacttcttgcggatctgctgcgctatacatcccgaacacattgaccgcatgtggatctttttctcgaattttatcgagtgcttcaagaattcggggaatgtcttttacaaggatagtcaatttcataataacctcaaaaggggcaaagccccttatacataatcaacggtgtaacgtgcgcgggttacgcccacatagattaactgcttacacagatcgtaatctgcgaacgcatacgcatcgcgcgtgtacatgtacgcatggtcatacgtgctcccctgtgatttgtggtacgtgcaaaccggaagaggcttaacatcctggaacttgtttttaatcgcccagaacgaatgccacggggctttatagcctgtttgttgcttgatgcgcttataagtgctcgcaacgtaggccagatagttacccagacggtctttcatcaccggatcaacaacaacctgaatctgtgcttcggtttcctcttcgagcgataccgttttcagaagatagaattcaagttcgatcttctcgtcgcacttctccgccttgataacttcccgacgcgggatgatttctaagactcggattttttcgttgttgttataaacaatctcggtgaagatttgcccgttcaaccgcatttcctgaactaacggttcctgcatcacgatcacttcatcgagaatgaaaggttctgttgttttgtacaggtgtttacggatcgttgcgttcagcttgtccacgttgtcgttagtgtaagcgaacatgcggttctcgatcaagtcatccggcgttttgacacggcggaaatactgacggaggaagtcaacagcgttagcatgttggaacacacccagatcaccgacagacatcggtttcagcatcttaccatcacgtacagcccttgaaacctgaataatcgggttcccttctgcctgacgcatgattttatccatacggataacatcaaagatttcttcatcaaagaacggggagagttcaacacgtccatcggcgtttaccggacggatctgatctttatcacccagtcccagaataacagcgttgcttggaatactgcgccggatgattcggaacagatccatatcaaccatcgagacttcttcaacaacgaacacgcgacaggtagacagatcaggcgctttcttgcctttctgctgttcgaacacacgcagttcttcgttagtcacagggctaatcttcaatgcagaatgaatcgttgttgcgtccattccggtagccgctgctaacacgtttttcgcctggtgtgttggggcagttaaccaaataccgctaatccccaaccctttcagagtgttaaagacaaacttaaccagtgttgttttaccaacaccagggccacccgtaatagttgtatgaatggcgttctggatgttgtggatcacgcgatcatgcgcggacttctgatcgtcgctcagatcatcaaatgttaactcgctcataatttgagtaataccccttgaattttcgaattctcaataaaccaacgcatctcttttttctgttcttcggttgctggtagttgctcggttttgcggaagaaactgaaacgcggttcgtccggcgtgtagttcagtttggtttcgtagcacttgcggataaaatctaatttatcttttgcaagttgcggtgatgcaaacagttccggcgttttcccgttttcaacgtgtggaatagtaaagccgtctttgtctttcgtaacaatgatatagtatttgtcaatcattttcgcccctcatagatgacgtagaaaaaacctataacccatagcaatgataatactatcaaagcggcttttctgtcaacaccgttaacgtggaaaacgcaccatccgaagagatacgttatcaccgcgcaaacgatataagacaaagcaaatacggcatgtagcgcggtgagttccattagtagttgttagcccaacgacgcaggttttccgcctgtttcagagcatacagcttgtagatggtttccgcatcaagtcccagcgcgaggaacttacacatgaagaagtgccactggtcaatcagttcaaacaggatttccagtttgtcttcttctttcatttctgcgaatacctggctacgcagttcctggtgatttgctttccacggtttccagacaccggaagccgcttttgcaccgcgagacataccgcccagagcggtgtaaagttcgcgggtttcgtctgcgatcgcatcatcttgcagtttcagccagtccaggatctcaccgcacgttttcagttcgttcggacgtggaacccaattcagggtatcagacaggctttgttgtgcatggttttgcaagtccagcatcttttgcagtgggtcaattccgttctgcaatgcattgcggtagaaaccttctaccatttccagatcatcggctttaaccaggtgcgcacagctattaaacacaggagttttatcagtcatatcaatctcattttttcggtgatttgttccacgacttaaaccgaagttttgccgtgagtccagaaacagtattatctttcaaatactgcatgatttcaagtttagttgcgccgtcagtttttatcatttcgttgatatcttttgacggccacgggcatttgtcccacaacacaaccttttcgccagcctcaatcaattttaaaaggcggtgagtagtatcagggtgtctcgcttcattgtcaagaacccagacacgcatatttttatacggaacatcggacagcgccatttgtccgcccgtaatcgcaccagcattatctacaaacaggctatccagcggcccttcaagcaggtagacaggtttcaacggatcgatggtatcttgaccatacactttcgttgagtgttcacatgctttgattgtcatgtattttgcgttggcattgtcacgcaaggcgcgtccctggaatgactcgattttacccttttcatcaaagatagggatcaccaaacgcggttcatccttcggtaaagggtatgcgtccgcattcacagagttaaccaggtgttgccattgacgcgtaaaccagaggcgatcatatttgtctttaggtatgtgacgacctgcaacatacttaacgatagggtgattttctggcaacgtgtccagacgttcacagaactgcaattcaggaatatatttcttttcttccttcggcggttcttcgtgcgtctgttttaaatctttacgatccttgaaagattccatcaaatacgccgtgtaatcatccgggtaataatctttcagaaacacagaaaacggcttgctgtagttgcagttaaaacaaccacacatcatgtgtgtgcctcgttttgatggaaagatccaaaaacgttttttgtgcttatccttcatggagtcgccacaaatcggacaacgggaatggatactgaattccccaccccgtcgaacgatttcgctttgtggtaatgatcccatgatacgagttgcgaactctatatcaagatacatgtttacctctatcggctaacttctttctctgtgccgtctaaagtgattttccattcatagaatatcttataaaacggataaggtctaggaatatcgacacccgatgatgtttttctttcgttcgtgtacacgatcgctgtgtcgctcatgtacttgatacggataggaaaccaggtgtaattgttcgcagtaacccagatccgataattcaatggcggtaatggtttcattcttcactcttcatgattttacgtttgcgtttatgcggacgtgtagaacccagaaccttcggccctttgttcgtgatcgcgcctgtagtcacacccgaagcaatattatccacacttccgcctgaatcacctgcaaccatttcttcgttgagtctttcgcgaagttctgggaggttcatcatgatttcttcgtgatcttgctcggtcaggttccagcggctccgtaacgagtcataagcacttgtaaggttcatgaacccagacatataaggaaccgcgtttaaacggcgcttgatgtgtctcacagagcgatggaatggggaatatgcttccagttcttccttcgttttcgggtttttcaatacttccccttgaccgtcgatgatacccagcttgtaagccgtccattcagtccagggctttttcagtaggcgaatcattcgcacactgtaggttaaatccatgtttttgattaattgatcgctcatagtctttactctattgtgaaagtgaaaaggttttgcgcgggttcttgctccggttcagggaattccatgcagacaacttcacacatcggtttcacgcctttccattcttccagataatatccggtatcaatgccgcaacctggttgcatttcaaggccagtttcatcaagaaactttttgcatttcgatgttgtcgttgattcgtcctgttggaaataacgccgtccagagtaacggaaattcgcggacatctgcgggagaatgaacgtacccgcacgggcaatctgtgaagcacgttcaatcactttatattcaaattccgcgcccgtatacttacccttaaaattggatgtctttatcttgccgaaaggtggattactgatcgccatatcaaacagagtatcaaactccgtcgttaacgcgtctgcgttaatccaggtcgcttccggtacgatacgcttacccaacttatagtatgtatggtttaactccacacagacgatttcacgcggtttggcgtacatcatcatatgaagcatcgcgaaggatagcccaccgatacccgcgcacaggtcaacaacgcttccactggtacaagcatcaatggtgaaatcgcgagcaagtccgatcggggtaaagaatgcacccagttcagagttattcgtaaatgcaccttcatggaagttttcgataatgaataatttttcgtcgtaggttagcgccttgtcagactccaccagatccattatcttgttgtgttgtttggtttccgctttcgttaacttcgccattgaccttttccggtaataagaacagaggggtagattctaccacatcaaagccccagtcatcaacaatattgctttcccagtcgcgggtttcccacgggctgcaaatccacttatacaccccagcaggatcttcaacctgttcaggcatacccagcatttccgcattgataccttcatccagatagccaggatgaatattaggccagcgcatgatatcaacgtagcctttatcgtcaaccgatacgatccattcggaacgatacggactatcgaacttcggttcttcttcgtctggaagtatcatatctaataaatcactcatttcactaaaccttctttaacgccctctttcatggctttcagaacaccgataaaagcgtctttgccaccgatagcgccgatgataagcatcaggacaccaacacaacccgctaaaccgattctgaacaggttccaggcaaacgggatagccagaagcactaaccacgggaacggaaagcccataagtgcgtttagaaccagtaagataaaagcgattgcaagtttcatgatgtcctcctttgtttgtttagaataaggtatcacctttcgagaatgattgcaatacctacagatacaaaaaagcccctttcggggcttgatttttatgctttgttgattagataccgaagaacgtttttggcctgaacttcgttacagcagagtttgaattctgggtcgattgggaggaagccccagaggaaatcaacgctaccttcaacatctgctttcccacttttcagcatttcaaccagcaaacctctgtttactacgctgttcactactgcatcgaaataacccgcgctgaaatccagttctgggttcatcacttcgtcgtatgggttgttcagtacgttcatttggtatctcctaatcagtttttgttgtctacgggagtcatattatcacaatcataactcccgtcaacccctaatcaggattattttgcgttttttgcaatccagagagtcagtttagggaatacatttgccattgccaccacaaacagcacccagaaagccagcttaaccacaccgatcacgatcagaggcgcaaatacaagccaccaggaagcatttgccataaccccgattgctgccagtttcagagacaggaggatcaggaacacaataacgagaatctttttcatttcactataccttttgaggggccgaagccccgttaaaattgaatgtctgtactgtttgctacttcggctaacttactgcttcggttagtctcggcttgttttaccatagcaccttgtgcttcttcaagcgttttcggcatctgacgacctttataatcagattggaacccgatatcgctgttgtcggtatccatccagcgttgattacccttgcgcacttcgagtttgaagtggttaaagtggttcttatcgccgtaacgggatttgatctgcttgaacaactgcaagccctgatcagctaactcgtcggtctcaatcacagctaacataaagtcagcggtagctggaagaccagcagattcggcaacgtcgcccatgctgatatcagaagcatcccacgcggcgcgggtagtctgcgcaccagtccacattacggtatttgtttcaacagccaaaccgcgaagttcttcggcaatcgctttaaccaggatgtatgtgttttccgccccgcgtacacgggtagaagcacagatccccaggtagtcaacaataatcacatcaggtacgaaactcttcttcaatttaagctctttaatcagcgctttgaagtggttcgcgttcgcccctgctgttgggtattgcttaacgattaaacgcccgaccttcgactgtttgaggcgttccatacggttcttatagtccgcataggtgatgttcccgttgtcgatatcgtccatcgcaacatcaagcaggttagcgtcaatacgtttagaacaaacgtgttcagccatttccatactgatatacaggacgtttttacctgattgcaggtaatcagcagcgagagaacaaagccccagagatttaccaacgttaacaccagccattaagatgttcaatgttccacgttctgcgccgcctttagtaatggcgttcaggatcgggatattgaaagcaatcttcatcgctttggactggtaaagcatccagcgtttttcatagtcttcgaagtaatcatgaccgaccgaactatcgaagctaatcgctaacgcttccgccatgatgtcagggattgccccaacgtcagggattttgttgttgcgttcgccagcaggtttttcagcattcgcctggatctcaattgcacgggacagagcgcgatacattgccttgtcacgacaataggtttccgtttctttcatcaaccattccagatcttccggcgcatttttcatgctgcggatcatctttttggtatcttcgtagactacatcactcaggctctttttgtccagagctacttctaaagcagtttgtgaaggaatgctgttgaattcctgtacgtgcttatccatcaaatcaaagagaatctgcgcgttcccttcgaaatattcacggcgtaaatggggccacgcctgaacaaaatacgtaccattaaaaaccagatttgaaaatattgtttcgacgatcattattacctcttaaaccagattagcgaacatctgaaagaaattatacagctttactttcaacgccgcccataaggtcttttcaggctttgggagattgggcttgatctgcgcgtagattgcatcgtgaaccagcggaatcagtttttctttgtcttcgtccggcgtactaaattcgactttcaggccgttatcccaatacaccttatggatgtacactaagtgtgcaacatcgttttcatcgttgatcaacagttcttgaataacgtcctgcattgcttcatcaagaatgttttttgttttttgttcaatgtccatgattcacctattaaaagggggcaaagcccccagttgtttattactcttctgacatatccacatcatcagggatatcgtcatcgagatcaaatttatttgacggttctactacatcgtcggaataaagatcttcgagtgctgccccgtcagtgatctctttgtcaggaatacggtacttatcctgaatggcatcaaggaatggctggtgagtgaacagaggtttccagaactcgatcgagttggtttccgattcacgccatttcttttcttccagttcaagttcgcccgtttccgtgttcaggaacgcacgaccgcgccagcctttcgttggagtctgaacgaagttcatttccatagccagatccagaagaccagagaacatactgataccgccctcataggtaacatgaagcgggaatttggatttctctttcacgaagcgagatttctcgatgttcatgatgaagtcataaccgacaacttccgtaccttctttcacctgctgtttgcccaggatgatcgcggtatctgcggaatacatcagaccagtaccaccggaaatgactttcttactgtacatttcttgtgtgtcgtatgtgtgacagatacacaccatcggaatatccagatccgccaggtaaggcgtaaccatacggaacatacctttaagtgctttagcgcgggtcatgtcctgtttgtcgttgtcagacagggcatcagccagttcttttttactcgcggtgttgcctacagagtccacgaaaatgatcactttgtcgccgcgttccagcgcgttaagctggcttacaacgtcatttcgaagttgctcaactgtcgtgatacgagtatacaccacacgatcggggtcaacgcccattgatttcaggtaagacttagttacgcctttctctgaatcatagaacagacacacagcatcctcattcgctttgaggtacgccgcaaccgtcaccagccccagattcgatttaaagtgttttgacgggccagcaaacagagttaagccggaagtcagaccaccatcgaaagcgccggacagcgccaggttcaggatcggtacacgagttcgagttttggtgatgttattgaaaacatcgctttcagacagaattgacgcagattgactattcgagtttttgatcagttttttcaggagtgctttattagacatttatttttccggtttatatacacgcataatattttcctcacaaatttatataaatggggcatttctgccccgtcaggtcttaccagtcatcaccaaacagagtgttcagggatgcgcgtttttcgtaatcaattttacatgcttccgtgatgttttgcaacgggctaatcacatgtttttcaaataatccgccgtagtctacccacttcaaaatatcttcttcgatctcagttggtaaacgcgtaccggattgccatgcgatgcaatcagcttgccacgggtttttatctcgcaacggcagaaccatcaccttttcaccttccatgatcggggtgattccttgaatacccttcgtatggcggttaaagaacagaacgcctttgatgtggtttggtgtccctttgattgggaagccagcaccatcattatattttgagatattattagcagatgatacaccagctatttcgcggtagtcaagcgccttatactcttcttcaaatactttgaagtgttcgtgtaaggattcttcaccttcttgcaggatgcgacggatcgcttctttcaagaactttttaaccgctgtcggtgtactacttcgctgggtttccattcccatgatctttaatttaggtttctcgtagcgggttccttcggagtcccatacgttagccgcatatcgtttcttagccgtccagaaactacccagacctttcgatcccagaggtggcccagaaatgatttcacgatccataaacatcaggtgttcgacgttattcatgtactcgcacagttcgcggtagcccttatcaatgataggttccatgcgttctttactgaacttatccaggaagtcaacccaatggttgttatccctgaacttactttcaccgccgactttcgcgatcacgttgtccatacaaacataaatggagtcggtgtcacagtaacgcacgtatgcgtaatccgtggtgttgcacagttcgttaaggtattcgttaaccttacgctcaatccactgaatagccaactgcccgaacatggtgatcgcactggcgtttcgaatatcgaagtaacggaaatgttcgttacccaacgcaccataaagggagttgatactgattttacggttaagctgtgcggtgttcgcctgtgcgattttcttctcacacactttcttcacggctttaagcatttgcttagacagcgttttcagtacagcttttgattcatcaccgaaatcttcgtagaactcgaaatcagggttgatcatttggttgtgcgtgtctgtcaggtgttcaagttcgtgcttaatcagttcgagatttcgctcacccgccatcattcgttttttccacgccttacgctgatcaaatactttcttgatctcgaccggaatcacgcctttaacatcgcgtcggaacatccacccgttaggagagcagctaaattcgtcgctaggacgcggcgcagtcttattgatgtattcatgcatcggacgcactgcaaagctgttagcgattgtctcagggcttatattcacctgtcggatgatagatggatacagactggtcaagtcgaacgatacaatgtaacggtatggagcgacaaccggatctttaacgtatgcaccatcatacggcgttttagtatggcgtttgttttctgggattactttcttctcttcacgcagagagttgtaaatgattgcgtcccacgttttaagcggtgacataaccccagggaagttgattttcgcgtagtatgctacagacagaaccagttcgataaagttgcgtttaccgtcgatatccaacacacggataacgtcaacgatgttatacgtgatgtatttctggtgatccgcttgacgcagttcagacagcgaaccttcgtaatcaactttgcttttacctgtttcgaactcagcgatcgcgcccagagcgtaagttggttgcggggtgaaactgaatttcttatagagatccattccatccatttgagcaacgccgtaaatctcatagcccagttgttcgttcccgtaatggtcggttgttgtcttcgcagtcactttcccgaacgggctgaaatgacgaacaacgttttgcccgaagatgttcaggtaacgggtgatgatatacgcgatatcgaacttgtttgagttccagcctgtaacaataacaggtgtccgctctttccagtctttgatgtacgcagacaacagcgacttttcggtctggaatgaacggtaaacaattttcttcaagtcttcttcgctgatctcattttcggtatcaacttttgacgctacccattcatctaaaccaccctcgacaagatcgtacacaaagaatttatcttcaacgctgtcatagtgggtgattgcgtcgatagcgtattttgcttcgcgtggatcagggaattcaggcgcggtaacttcgatatcaagtgaagcaatgcggatcttgtcgcgatcgtattcgatttcctttctgtaggaatcggagatatacgccagcctgaaatcatccatgcctagcgcttccatgcctacatctttcattcgctgcatccagttttttgcttccttgatgctttcgaagttctttttgatgcaggtcttgccgtaaatgtcgcgatatggtgagtctacacccgccatagcgtgttgaaacattgtaggcgcatattttgttttgcgaacctgttcgcgtccctcagagtcaatgaagcgctcgtagatgtgatcgcccatttgctcaacggatagataaaattcattcattacggttttctttctccgtgtttaatcgtgacaggaatgataccccagccagcttgatcagatcaagcgagcgttgcgctaatttgtgatagcgttgggtgtcaggccgatttagttgttcaaccagcacggtatattcttccatgatgcgggtatagaacttagggaagtgatcccgcgcgtatgcgtaggtgcgcagatcagagagattgcaagtaagagacagtttgatgtcttcgctatgcagacggttgatcaagtgatcgccggattcaatagctttgatgatttcttcaatacgaattttcataatttagtcctcacaagtggtgtacaaccaatataacaaagcccctgcatttctgcaagggcttttgattaatgtccgatccggtacttgtatttcaaagtccattcagctttttgtgcgtgagtcaatacgcggaagttgttctcttcggagaatttcagatccggcgtaaggatggaaaccataccccactcttccagaagtcgcgcaatgttattgcggcgcagttcgtcatcttcggtcatgtcaacctggcgaccgtccagcttcaacagttctttgaagtgtacgataaaataacgcccttgtttctgtaggatgtggcaagactgccacagcattttctttttgttatttgcgatcccgatacgggtcagcgtttcgcgaattttcaggaaactgtcatcgctggacagtttaatttcgagcatgttcatacatcaccatttctttattagttgttcaacctttttctggtcggttttatttttcacaacatcagccaacacagataaagcaactttcatatttttccgcttccactcgtccagtttttcaagctgtttgagttcttcgtaatattccattgctatacgtgtatttacaccgtatcgtttttggagaacatgaaggataactttcatttcgttatcttcggtgagtttagcccacgccccgaaccgcttacctttgcgcaccgtatgcaggtaataatcaaagtgcgcctggtctggtaaaccagaaccgatcatattcatcgtgtatgcagggatcagcgtttcgatatgctggctcattgcattgtcgatgaaaaacttatcgtatgaatcaagggcagagatccgtaatggtgtcttcccgttgttcagttcttcgagcaccataaacaaggtgttttccttgtctttggtgtactctttcacaagttcttcgatcttgtcccagtctttagaacgccaggccgcttcatgttcgttcagttcatcttcatcgagaaaagcagccagtgacattttaagcctcccacgcgagggtaagcattaagcccatgaacaggtattgcaggtgaatctctttgttcactgccagcccgtactgtgcgttgttttcgcctactgcctgaatgagtgcaaccttagattcgttggtgacgatcgggtataccgcatccagaagtttagccaggaaagtttcatactcaggcgcgtacttgattgcttcggctcgcagtgctttgaagttcttcgctttaagcccctcaatcactggtgtgatgtccgaaccaacaatctcagacagaataccagcatcaattttgccacgcttagaatagaacccaagagctttaacgatggatcgcgcgtctgggtagtgcttcttaacgaatccggcgatcacctgctggtcatattcgattttctcgatttcgaggataccgaaacagcgtttgatcatttgcttcatcagttcaacgcgttcttccttcgacggagaaccgaacttgactaccggacagcgggagatcagcgcagggtgaatcccgttgatgttgttcgcggtgatgataacagtaacgttcttgctgtacgcttcgataaagctacgcatgtgcttctgtgcttctgccataccagggcgatcgaattcgtcaatcagaatgattttaccgcctttcttctgcgtcatagaggacgcgtaacgatccagttcgttacggatgaagttcacaccacaatcggaaccgttgacaaacatcacttccgcatcaacttcgttagccagaaccagcgccagcgttgttttacccgtacctggggaatcagaaaccagagtcatgttgtcgatgcgtccagacttgatgaagccgcgcatcgtcgctttatcagcagcagggagaatgcattcatcgatcgtcgtcgggcgatagcgctgatcccatgcgaattcttcgggagactgggagattttgccgtatttggtttcgattaactgtacgttttcactaagttccataatattaccttcaattgattatcaaaaaggggcttaacgccccttgtgtactactttgtttatcttacttgaactggctggttgcttcaagtaccactacatacgcaacgccgttttcggacgagaatttcgcagcgccgcgagaagagatttcaactttgtaatcgctgttgatgaactgcatgttgtcaatcttcatatcgaagttgaacatgttatcaccttcgtaatcgcccacttccacagagaaggttgactggctttctttacttttcgcggtgattaccagcttgccgttgattggctcaacagacaggtcggtcagtttcatcatgcgtgacgctttgataagtttttcgaaatcgttcgcgctaatctggaaaatcagatccgcaactggcatttccagacgcttcttaggctgtacgattgtggttggatcgcttgaacgctcaacgattttcattttctcaccacgaatgacgatttcgccagtggacagatcgtgagttacttcggcatcagtgcctacaacgttcagcatgttcaggaatgagttcagatcgtagatacctacatcttcgtcaattacgtcagaaatcgttgcttctgcgtaaactacgctgttgatggatttcgtcataatgaacgaaccctttttcagcattacagacgggttgatctgggaaaagtttttcaggatatcgatcgtttgtttagagaatttcatattcaacctatagttttcaattaggcaaaagtgccgttaatcagggattctacaacgcgatccgccgcattgtcaaggaattctttgcttttggattctgtgattttcgtacccgcttcgcgagcgtcgtgaatcagtccggtatgtactgcgcttactgcttcgtcgatccgtttgtaatgctcaaagcgttcagcttgaggcatcgcacggaaaatctctttgatgttttccggcactttacctacccaggatttgcgaacgttgttcagatgcgctacatatacgttttgttctaaattcatatctacctcaaactttcaaattgggggctttcgcccccgtaagcattacagatccagcagtttatccaggtcgtcatcaccggaaccaccttccaggtcaaacggaggtgtattatcatcttccggtacgcttccgcctacgttcagttgacttacgccaccagattctttagcacctttggactggttgccattatcgaagtttttcagttcgttgtcaaacgaattcagttcggaatccagatccgcaccagcgcttgcgccagcacccattgcagcaccaccgaatactttggtgaacttcgcggtcagttccgccgttggtttgaactggtctggtgcagtgattggacgcagatcgctcataccttcgaagatttctttctgacgcgcttcgtcttcgatacctttgattggaccaggaacaccaaatttgctgtcgtcgtagttaggccagtcgcctactttcttcgcggtcagggtgaagttagcgccaccaaacggacaggtcacagcaacacctggttcatccagatctgggttccccgcgatagccgcagtgattttatccatgatctttttaccgaagcggaacttaaacaccttaccttcgttttctgggtgcattggatctttaaccaccagaatgttcgcccagaacgattgtttacgtccgatcatacccagtgttttttcggcttcgctgcctttcactttcgctttttcgaacagatcgttttcagagatatactgacacacagggcaagcatcgtaatcgccgtgggtagacgggcagttttcgatgaaccactggttattctttttgaatgaatggttgacgatacgcacgaacgccagttcatcatcagatcggttaggcaggaagcggatcaccgcagaaccgtttttctgtgcatcgacaccgagtttccactctttttcatctttctggaagccggatgaacctttcagagcggcgacttgttcttgcagtttggttggatcttgacgtttaaagaatgacatatgttatttctcgtttaagttaattaaagtttgtttcattaagtttcggtattttacgatttcttcgttactgatttcaactaattttctgtatgcgtttagttttttactaaattcattccagacgaaatccgttgcgatttcatcgtgtttatttatgatgtctaaaaacgagtcgaggatcaagaatgattcataagaaatcaccccagactgtacgagtttgctgatatacgaggttgatgatttgacgctatactgaaacaccgttgagaggggaatgcctttcatgcgggaaaattcatacaggttttttacatcgtccacgaaaatattatcaattcgcctcaacttgcctatgtattgacgataaaacacgatcgtatcttcgtctacatccccgacccagaagtcggggttagctaccatgttggagagaagtataagatatatttctttaaatgtaaacctttcggctaactttttgaaaaaatacttatctcttctcttttcgaacgctttttcagtgatctttatttcccatttgtacttgatcgcgtcataccgtcccgcaaagtgatttttcatcaccagatacagtttgtataccgcaatcggtttcaaacgggaattagcgtctgaactgtcaaacggggttttaaatttcacatgaaatcatccagtgtttgcgtcgtcgcgtggtctttagccacagaaggacgcagcagattgtttttaatggcttcgtcgctaatcttgtcgatgatcgctttcggtactgttttggacagcatagcataatcaatgctgttttcgtccatccattgtaacgtagcttccatgtaggttgccccctcagaggcaaccagattttcgatatacaagccgacttcggttttgtttccgatttcgctcatattacgccttatcgatcacatcgtacagttcgataagttcgttgttctgttcttcgaacgcggtacgtgcctgttcgtgatacagtttgaacagcttgccgaaggttttaccgtcgataccataatccgttttcgctttggatttgatgtctttgaaagaaccctggaagtgttcgatctgggttttcacgttcgacgcttctttgatcagttctttaaccgctttagcgatgtctgggttttcttgcagtaattctacactcattttgttacctcaaaagtcacttagtttttcatacatacgggtaagtttgcattccatgaagtatttctccatttttgctttgttcccgatttttggagcattgtacgcttcttcgattgccgttgcaacatctttcggaataaaatcaaagtcgcgaagttcttcgttttctctgtagcggatcgcccactcttcgggcatacccacggtcggatcgtccgcttccagccaggcttcgagttcagcagccctgatttgtggggcgcgttctccttcaaccttcgtaacaatatagtcatttcgcattttaatgcaagcgatactatcttttttatcgcccttgatgatcttcatgcgcaaatcgttacgaggcgaaccatatttcggtgtaacccatttcttttgggttggcgaccactgacgcacaccctgatatttttgaagggctgcaaagtcaccatcagcagaaacgatcaggacacgtttaccttcggataccgctttacgcgtcaccacaccgatcacgtcatcggcttctgcgaagtcaacacggatacctttgtacggtagattagcacggatttcatcgtatgtcgggtgaaggaaaccattcaggcgatcccagtcccaatccgatgcttcttgttccatttttcgtttctttttgtagtaccaggctttacttctgcgccaatacttgttatcatcaaaggctagaacaatttcagggtactcgcctttgaatttaaccacattgtgacgaatggtgtcaagcactatgtgacgaacaatttgttggttgatgtcattctggtctttcggcttgaagttgttcatcaacgttgctaccgaaaggtttgaaatatctatacacatcacatcaacaggatcatcgtcattgctcattaagctgttcaggttgaacatacttgcaaatgaagacatttcaatacctcgttgttgttgaatgaaactgattatagtgatcactttttcaaagtcaatagatcatttcaaaaatctgagcgaagcgaaggacacgaacgtagtgagtgtctatgtactgaatgtacgttttaatatttttatattttatatatagagaaaacagtacatttccgtatactttttaaccagatctaactatccgtttcgcttcgctcacggaagcgcttcgcgctgattttattaaataatatagattggaagtaggtttgaaacacctgattcaatcggctataatgaatgtattcaatttggagaatataatgactacaaagatttatgcagataatgataagctgtatccagttatgtgtaagtggaaacagcaaatccgtgaaactggtgatcgtaagatgccggatgaactcggtattgcgattatgaacattgctcacggtttggcacgtcgatacaacttcaaccgttattccgaagactggaaaatggatatgatcgatgatggaatttcggcaacgatttccggccttcataactttgacgaaaccaaatatacaaacgtctacggttacatcaacaaggcttgctggcaagcgtttgtaactcgtattctctacgagaagaaagagaacgcgaagaaatacaaatacttcctggaacatgtctatgacagcgatgatactgatatgaccacgatagccgatgaaactttcattcaggatatccatgacaaacttaatcagtatgaagagtccgcgaaaaaacccaaagataaaatcgaggttgtggacgaatcgccaacattggaaatgtttctatgaaaattaaaattgacctgaacaaaattttagcagatgctaacgacgaaattgatctgcttccttaccttgtgaaattagagttgcagagcttagggattccgattatcatcgaccctacagatgtacgagatccagacttccagataacagaaggtcgtctggactatgtaataaacgccgaaacaatgatcatggagatcacttactatgaacgtgcagcatgaagtaatcgacgaagtacaccaaaaatcagcgctggatcttcgtgaagaagaactggactccatcaagggtacacgcattgaacaggaagccctacgcaaagcgcaaaagttcatgcggaagaacaaagcggaatggaagcgactgcataaacacgcagagaacgcactcttcgaaggtaacaaagagcagtacgtatacgcgatcaaaaagatgcgtgatatgctcaagcaaccatacaacgatgaactgattgaaacgatgtggatcacttcgaaccagcagttgaaagacctgttcatcatggcttctgaaaaatacggcaaataaaccccttcgggggttttgaggtttatatgaactatgttttaattggggatacccatgccggacttcgccaggataacccctggaacgaagaaaacctgtatgcggtattcaaacagatcgtagagtattgcaaagaacacgggatcacgcgcggcttccatgctggcgacttcttcgacgttcgaaaagcaaccacacaaacgacaatgaattttgttcgtgaaaagctggttcctcttctgattgaggcggggatcactctggatgttcttgtcggcaaccacgattgccaatttaaggacaaaatacgccccaacgcgccacgcgagatactaagtcaatacgaatgctttaatgtcattgacgaaccgaccacggttgatttaggtggcggaaattcgattgacctgatcccgtggatttgtcaggaaaacagccagcgtatttttgactacatcaaacaatcgaaagctaacttttgtttgggacacttcgaactgtctggttactatttctacaagaacagcaaagccgatcatgggctggaacctgatttcttgaagaagtacgatcgtgtttactctggacactatcaccacgctaacgagggtgataacgtgttttatatcggtacgcctctgactatgagcgcaaacgacgaagacgaaacacgcggattctatgtgttcacgggcaagcctgaattgactttcatcgctaaccctgtgtgtcaccatcgccggatcatgtatccagcacagaaagatgttgatctcgaacagttccgcaactgcgcggtgcgtctgattgtcagtgaaattgatcaggggcttgcaaagttccaaaccaaaattgaagaaattgcctatgaaatcaatatcatagacaaagttcaaacagattcggatgtcgataccgactttgaaatcaaaaccgttcgtggccttatcactgagtatatcgccaacatgcagatcaccgacgatgaaaaagaggaagtgaataagctgatcagcgaactatacgcggaggtgtcaagtgcatagccgttatgatgaatatttcggggaaaatccccgatattctcacctgttgcgtatgttgggaatgaaacacatcatttccacatccgacgaagcaggggaaaccagcgcagtttgtttgaccatcatgaagggtgcatggcattcatcacgaacatggtcaatattcatgcttgatacactggacgacgatactctatcatatagtattgattcatcagttgttcaaatgatcactgaattatgtgaacggattttaaatgaaactaaacttcaaaaaaattaagtatcaaaatattctgtcggttgggaacaccccgatcgaactggaatttgatacggcaaaaaaaaccctgatcacggggaaaaacggtggcggtaaatcgacactgatcgaggcgttaacctatgccctgttcggtaagtcattccgcgatctaaaagtcgggcagttggtgaacagcgtcaacaaaaagaaatgcctggttgaactggaaatcgaatacgggaaagactcgtacaaagttgtgcgcggacaaaagccgaaggtgttcgagatctggaagaacggcgagaagttgccggaagactccgcagcaggtgattatcaggcacagcttgaatctatgctgaacatcaaccttgtgggcttcaaacaggttatcgttctgggtacagcgggttacactccattcatggaactgaaaacccccgaacgccggaaactggttgaagatttgctgtctctgtccgtcatcagtgaaatggacaagttaaacaagtcatacattcgcggtgttaatcagcagttggatacactctcaatgcagggtaatcacatccagcagcagatcgcaacacaccagcgcttcattgacgaacagcgagcgaaagcaaaccagaacaacgcccgatacaaagagatctacgatagccacgtagaaaccgcaaagaacatcaaagcacagcttatgcagttgcaagcggagattgcggaatcggtgatcactggagaagaccggacggaagatatcaacaaactccgtgacggttattcgcggctctcaatgactgtagaacagtttaaaaagctggaggtgatgtatcagaaaggcggtgagtgtccggcatgtaagcaagcgattaaacccactcctgagcgtatggcggagatcgcagagaacatcaaagcgggtacacaacgtttaaccctgatcaaaaccaaacaggacgagttacaagggatcatgaatgacttgctgcaacagcaacgcgcactcaatgccctgaaaaccaaatatgaagccctgaaaggtacactgcaaaacgaagttgccaacgctaaacgcgcacaggcgatcatggaacaggcaagcgcggaagtagtcattgatgaagaacccgtgaagcagttgcaacagcaggaagcagaactgaacgaaaaacgacaaggctacgtcaaggaaaaatatattcgtggtattgttacggatatgttgaaagattccggcgttaaagcgagcatcgttaagcgttatattccgtacttcaacaaacagatagcatattatctggatctgttgggtgctgattatcagttcactttagatgacgagttcaacgaatcgatcaaatcactggggcgcgatgatttcagttatgcgtcattcagtcaaggcgaacgcgctcgcatcaacttgtctattctgttcacatggcgtgacgtgacaagtaaagtatcaggcgtggatctgtctctgctggtacttgatgaagtgtttgatgggccacttgataaagagggttcattcgcgattaaatccttgctggattctgtagatggtaacgttattgtaatcagtcaccaggatcttgatccgcaggacttcgaccgacacatcatcatgtctaaggttgggcggttcacaaaaccatcaatcaaagatatggcgatctcatgttagaacgtgaatttgatttaaagacctctcccgaagtggagaggttttatctccataatgaactattggaagaaaaacatgtagttacaatggcagatgttgaggaagcattcaaagataaccccattgaattgacccgcatcaagaataataaatcttcggtgtggttcctcgaaaaaatctattgacagtaaaacataaataccttaaagtcgcccgtgtactgagttgcacgggtttttattttgaggaacggaaaatgattaacgaacaaatgtcacacagcgaagcattgaagattttgggcgctactggcgacgaatctaaagctgaactgtcaaagctctttaaacgtgcttctctgcgcaatcaccccgaccgtggtggtagcactgaactcatgcagaaaatcaaccaggcgtatgacgttgtaaccaaaacaaacagcgctggtaaaactttcagtgatgttcgcgcagaacacgcagcaaacaagaaagcgtgggaagaaaaatttgcagcgtatttcgtgctggcgaaaaactatttcagcactaaattcaacgcgcaagaatttgcggaatatttcacgaaattcaccggacaaccaacaacctatacccagacaatcagcgaagttcgcggtcacactgttcacgcaacctatcgtttcacttctggtgatgcgttctttgacttctctttctcttgtcaaccgcctaacggtcaaggtttagcagcgccggacgcgtccgcactgggtagcgtatcagttaatactctggttctggttggtacgaagaaacacaaaatggcaagccgcgattaccaatggggcaagaacccagacaaaatcacgccggaaagcctgttccctactaagaaactggaatccatctttagcccgactaagaaggatctcaagttcaaacgcgcggactacatgacatcctttgcccgtatcctgggtgcgaaggttagcggtaacgatgttattgttgatgttggacactataaagttcacttctaccgtcacgtattcatgcgtaaaggcgcgtatgtgttccagtatgttgttgacccaactgtgaacaaattcaaacctgctgaacgtctgaaaggtactatgctggaagacgaagacggtgcatgtctggatatgatcatcgacactttcaaagaaatgcagaaagtgaaaccagacgcaagcggaatcgcagcagtaatcgacaggatgaacgcagagtttgcagcggggcatcgttcagcatcttttgttaaacgtaccgcacagcaagcagcagcgccggaaccagaacagaaaccgaaacgcaccgttaaccgcatcaataaagatgactatttcaacgcactgaaacaagcgggggcaacattccgcagtaactacggtgagtttgataacggcgcgggtttgactttccacttcaaacgcgagatcagcaaccgtaaaggtttctggagtttcagcagctttaactttatgcactccggtcagaaacatgttgaatggttgaaagatatcgacattgacgaggatagcaaaggcgcaagtatcggtttgctggttgataccctgaaacaacttcgtggtgttgctgactggtacacagcccgtaagatcctggaaggtatgcgtgataacttcaaggctggtaaattctccgcacctcatgtgaagaaagaagccgaacagaaacgcactgaaacgcaagctaaggacgagttaggcgcacagcctacgaaaccacaggcagcgaagaaagaagccccagcggttgataaggcgcatcaggcacagatggatcgtgagaagtcacagatgaatgcaaccattcgttctatgctctctgccctggttaaagccggacgcaaagacacgccggaagaaattaaaaaagcagttgatgaagcaatcgctctttggcgcttgaaacactaactgattatgctataatgggaactgttgaaaagcagttcccttttttatgaggaaaatactatgagttgtccaacatgggcgcactttgaaaacctgaaagaaggtacgcaaaaacgcgtgtttatcaatctgggatggttcgcacctacagattttgacattgctgaaattctggttaatgccagtaaagagatcagcgatacttacgaatgggactgtgtgagaatgccagttctaccagggcagtttattgatcgcgagaagttcgaagcaatgcggatcgccgtcgaaggtatcaattcgctgcatcccccaagtttgggtatgcattaccgccagcgttttaccttgaaaaccgcatggactaaagataaagaatgggtgaaagtatgattattcaggtatcggttcagggcaataccctgacagtaacaaattccattatgaccgctatggctgcatgtcgtgatcatgtgatgtcaaaccctccggtaacggaaattctggaaattgatgtatgggaagacggtgtgatcgaagaatcatttggtttcactccgttagaggaagatttacgtaaaatggaacaatggctatggcaaactgtaccccaatgaaactaccaaaacacacaaccctgttaacccgcgaaaaacttcattctgttgaatggagtccgttagatgtgatggtgttcgatctggaatccaaaatcatcaacgctcatgttaacggtttgagtatcttttctgttgaatttgaaaagattcgcgggtacaatgaagcctgtaaagacaaattgcgcgtcatggttgaagctatgggctacatcgtgactattgaagacaacaaaatgtggatcgcgctatgagcaaagtaaaagcagttttcgccgttggtcatgatatgtacgaagtggactatgcgtttggttatgaacagggtttaccgtggggccactgcaaagaggatttgcagaacttcaaagaagaaaccgcaaatagcgtcctgatcatgggtgcgaacacttttacttctctgcctggtaaattgccagggcgagttcattgcgttctgtctgcatccggtcaacgtctggtaacaaagaacgggaataccgctgattatgtcatccacggtggcgggttgtctgctgcaatcgacgtaatgaaagaaacgcatccagatcgtgatgtgtgtctcattggtggtaagtggttgcttctgcaagcaatcaataatacaatggttgatgaagtggttgtgacgcacatttacggacatcatgtatataatgcaccagcttttaaacgtgatgtttcgttcacggttcctgaattctgtgaagcggttctgaaatatgaactgactgatttcaaaattcagcagatcgaatcaaacgaacgcgtcagaaaaattatcgtcgatcgacatacgaaaaaggcataaaatgaaacaatatcttgatatcgtcaacaccgttctaacacacggtactgaatcaaccgatcgtactggtgttggtacactgcgcatcttcgggatgcaagcacgttggaacctcgcagaaggtttcccagctactaccagcaaacagctattcttcaaaccgtgtaagcatgaattacaatggttcctcgaaggttctaccaacgtggaaacactgcgtaaaatgacgtggggtgaagatagcgataagcggacgatctgggacgataactacgaaaatcaggctaaagcgctgggttatacgcatggttatctgggaccgatctacgggcatcaatggcgctcatttggtgcggaaggttcttattatggtgttgaccagattaagaaaatcatcgaacaactgaaaaccacaccagacgatcgcgggatcatcgtttctgcctggaacccgatggatctggatgatatggctttgcgtccgtgtcactgtttcttccagttcgtcgtaatcaacggtaaactgtctctacagtggtatcagcgttcagttgatgtcttcttagggttgccgttcaatatcgcctcctacgctctcctgacgcatattatcgctgatatttgcgggtatgaagtgggcgatctggtttggactggcggtgatgtccatatctacaaaaacgcagtagaacaagcgaaagagttgttgaagccggaacgcgcaccgcttccacttccgaccctttatatgccgaaggtaaatagcttacttgatttggatcaagaattctttgactccatccatttgaaagactataatcaccacggctcgctaaaagcagctatggcagtataaacaaagggggcgaaagcccctttcttaacaaggtaagataatgagtgatattaaaacagtagtgaagtcttctggcgtaagtcaaacgttcgaaaaagaaaaactgttcaaagtccttaattgggcgagtattggaagaaatattgatgttaacgcattccttgaaagtgtcgttgacctgcttcgtgatggtatgactaccaaacagatccaggctgtagcgatcaagtatgcagcggatcgaatctccgcaaaagaacctgactggcagtatgtagcggctaacctcgaaatgttcgcccttcgtaaaaccgtttacgggcagtttgacccgattccgttctacgaacacatcactaagctggttgaggctggaaaatacgataaagaaatcctgacaaaatggactcctgctgagattgattatctggaatcaaaaatcaatcacgataaagattttgaattctcttacgctggcgttcagcagttgatcgggaaatatctgttgcaggatcgcacgtccggcgacatctacgaaacaccacagtatgcattcatgctgatcgcgatgtgtctgcatcaggacgaaaaacacgctgataaaatcagtcatgttgttgacttctataacgcgatttcggatcgtaaactgtcattacctacgcctattatggcgggtgtgcgtactcctacgcgtcagttctccagttgtgttgtaatcgaatccggtgattctctgggttctctgaacgctgttacgtccgcgatcgtgaagtatatctctcaacgtgcgggtatcggtgtcaacgcaggacacattcgcgctatgggttcaaaaatccgtggtggtgaagcagtccatacaggcgttatcccgttctggaaacacattcagacggcggttaaatcctgttcacagggtggtgttcgtggtggtgcagcaaccctgtattatccgatctggcatcttgaagttgaaaacctgctggttctgaaaaataaccgtggcgttgaagaaaaccgtattcgtcacctggactatggcgtacagcttaacgatttgatgtataagcgtttaatcaataacgattacatcaccctgttcagccctgacgttgcgaatgatcgcctctatgacgcattctatcaagcggatcagagtgagttcgaagaactgtataccagtctggaaaaagacccaacggtacgcaagaaacgtattaaagcggtagatctgttccagttgcttgttcaggaacgcgcacagaccggacgcaaatacattttcaacagtcatcacgtaaaccagcagggtagtttctctgttccggttcgtatgtcgaacctgtgttgtgaaatcgcgatcccaacttcaccactggatgacgatgataaactggctggcgaaattggactgtgtacgcttatggcgatcgttctcgataatgccgatataagcgaattcccagcccttacacgcatcgcagtacgcgcactggataacttgcttgattaccagaactaccctgttgcagcggctctgaaagccaaacagcgtcgttctctgggcgttggtatcaccaactatgcatcctggctggcaagcaactattgcgactactccgaagcatacgccggaaacgttcatgagttgatggaagcgtttcaatttaacctgctggttgcctcgatggaactcgcacaggaacgcggtgcatgtggactgttccatgaaacgaaatatgcacaagggctgttgcctattgactggtactgcaaaaacgttgatgaactggcatcacctgtgtataactgcgattgggaatggttacgcggtgaaatcaaaaaacatggcttgcgtaactcaacgctttctgctttaatgccttgtgaaagtagctcgcaggtgagtaactcaaccaacgggattgaacctccgcgcggccctgtgagtgtgaaatcttcgaaagaaggttcattcaatcaggtagtaccaaaccagaataatcagattgacttctatgattatctctggacaatggcaaaacgtggaaacaaaggttatctgtcgcacgtagcggttatgcagaagtttgttgatcaggctatctctgcaaacaccaactatgatccggctaacttcccagatggtaaagtgaaatctgaaatcatccttgaagatctgctgtatgcaaactatttcggcatcaaaacgctttactaccacaacacccgcgacggtgcaggtgaggaagaagcggaagattgcgaaggttgcaaaatttgattcaatgccccttcgggggctttttataaggtaaatccatgttaactgtaatgaacacaaacccagatcacaaacacttagaacagcctatgttctttggtgaggatacgggcgtagcacgatacgaagaacagaaacaccgtgtattcgaaaccctgactgaaaaacaactgtcattcttctggcgaccggaagaagtggatctgtctatcgaccgtatgcagtacgcgaaaatgccggaacacgaaaaggttattttcgattcaaacctgcaatatcaaaccctgctggataccattcagggacgcggcccgaacctggcgttcctccctatcgcttccgatgtctcaatggaaacgtggatcgaaacatgggcgttcagcgaaacaatccatagccgcagttatacgcacattcagcgcaacctacacatcgacccgtcgaaagagttcgataaaattctgcgcaacgaagcgattatgaaacgttcggcttccatgacaaaatactacgatgacctgatcgcagaatgtcatgaactgaaaaacatcgtgctcaaaatcgaaatgttaacgtcccacggatacccagacgaatcgatcgcagagtacgagaagaaacgcaaagagcaaatgcgtaaatgtaaggttgctctatacctgtgtatgcacgctgtcaacgctctggaagcgatccgcttctacgtgtcgtttaccttcacgttcaactttgccgaacaaggcaagatggaaggtaacgcgaagatcatgcgtctgattgcccgtgatgaagcacttcaccagaaaggcactcaaagcaagatccgactctggcagatgggtaaagatgacccagaaatggcggaaatcgcttaccagtatgaagaagaagcgacaaagattttcctggaagtgtacgaacaggaaaaagaatgggctgaacacctgttctctatcggtgatgtagacggcgtatccctgaaaagtacgatcgcttatatcgaacacctgacagatcagcgtatgcgcgcggttggcttgcagtctccatttaaaccaacgccgaacccgtatccgtggatgaacaaatggttgaagtctgacaacgtacaggtagccccacaggaagtagaagtgagttcttacctggttggcaacctcaacaccgagatcagcgacgaagcctatgcaaaatggcgacaaaaatacgcttgattgtcgcgtcgtaaacaagtataaaggtagctgggatgtcgatattcagagaggtacgaaattcggcaatcccttctacaagggaacacgggctgaaaacataatgaagttcatcccgtatttccaaaacttgattcgaactggcgtgatcacaatcgacgaactgaaagcattggacgggaagcggttaggatgtacatgcaaacctctaccgtgccacggtgattatattgctcactgcgtcaatgtgttgaccggaaaggtgaataagttggatatataatggacgatgtaacatttggtgtaatatttcctttgcgtctgggttcagacaagaggatagaccggagtttcgttaaatgtggcgaattccggcattgtgtgtattttattgaaatcgacggtcggatagtgtatgttggaaaatgtcgtgatttgtggaagcggttagacacataccgcaattcgaaatactggagggaagcaaaccccagtaatattttgaaaaccgcacgtctggaaatggcaatcaaaaaacgtaagcgtgtaaatcttatcgtgacaacacacgatgaagacacatatcatgattttgaaataaacatgatccgaaaaatcaatcctgaatggaacaaacagcactatgacaaagctaaccaaaaatcagaaaaccctctttgaccagttgatgaaactgtgtaacgaaagcgaatgcttctacttcattgatcaaaaaactgtgatgcaaaccaacgtgcgcatctttaactatcgcatggcgagctattccgactggttaaaacccggtgcgctggaatgtcgcggtatcatgtttgcgatggatggggaaacccccgtaaaactcgccagtcgccctatggagaagtttttcaactatgccgaggtaaaggcatgggaagcgctgaaagcctctcctgtgacgattggtgaaaccgtagtggatgtgatgattaaggaagatggttccctgatctccaccttctgtgattccggctatctgggcgttaagtctaaagcatccgttcaatctgaacaggctatggacgctatgagcgtgatccagactaaccgcgcattgttcgaccgcctgaccgaactggttaacgatggtttcaccgtcaacatggaatacgtcgcaccgacaaaccgtattgtaattggctatcaggaaccagcagtggtgatcctgaacatccgtaataacgacacgggcgaatatgttgattatcaggatatcttcgcagatggtgtattacgtccgttcctggttgagcgcgagaaaatcgaaatcaccgatctggatgcattcattaccgaagcctacacgaaagaaggtttcgagggttacgtaatcaaaactgataaaggttttgtgaaagcgaaaaccaactggtatgtaaaccttcaccgcacgaaggatagcatcaacaataacaaagatctgttcttaaatattgttgaaaataccgtcgatgacctgaaacaaatgttcctcgatgatatgtacgcactcaagaaaattgacgcattcgaaacgttattccttgatagtctcaatcgtctgactgcaaaagcattccaggcaatcgaagacacgaaaggaaaatcacgcaaagactacgcgatcgccctgagcgctgacttaacccctgacggtcgtatcatcttcgggcctatgatgcgttatttcgatgataccgataagcaaaagctggttgataacatcgttgcattaatggcgaagaactacgaacagtttataccggaagaatataaatgacaaagtgctttggcgctggaagcacaacgttagaagaagagaaagcagggatcgattccctgcttctttacgttgacgttttcccagaaaccggaaaaattttttggaatagcaatgcagcaaaacagaatcagggaaaagaagctggttctattatgagcaaatcaaaaccttacgtgagaattcggcacggcgatagaaaatatttaagacatcgcataattttctattactgtaatggttatctgcctttgcttattgatcataagcatgggttggaagctggggatggtatagaaaatctacaggaatcagatccgcttcataatatgctgaaaagaaaagctaaatcaacacctaaaacggttaaatccaaaggtgttgattacagggcttcgcgtggaaaatatcgagcacagataaagatagacgggaagcaaaaacacatcggttactatgataccgaggaacaagcatcaatagcttacgaggaagcgttatatgaatatcaaaaacgtattgggtacgtttaatataagttcgtggatatggcctgtaatagttgctggttcgttagcagggcttttgtacatgacaatcacgctgaaaagtgaaaatgaccaattggctaaagatatcaaagagttacaggctgatatcaaaaaagtcaaagagacaaacaacaccaatacggtgatctatgtcgaacaaaaaggtaaggatcagcagttggtcaaggatgccggacgtaaagacctgttgttcaagaaaccaggactgatcgaaatcaagatcaacaagtccttcgaagagtatatggcggagtacgacaaatgaaaatttcaacattagcccttgttctgggcgttctgttggtcgggtgtgctgagaagcccccagaaaagattttgcctacgctccccgctaaggtgaatccggtgaatgtgaaatggaaagtggttgcagaagtccgagagattgacggtaaaaaataccttgtcatgccttatgacggcaatccatacgttgccctttcatatcccgattcgttaatcttccgtagctggatgaatgacgttaagcgtcagaaagaccagacggataacattctgtgtaccgtgggataccctgagaaatgcaagtcaaaataatcaagtcatttttccgtgacataaccgaaggaaaggtttatgatgcgaagaaggacaaagaaggtctctggatcgaaaatgactggaaccgtgatatgtggctcaatctaacgaatgagcataacaaagaactgattgaatatgagattgtgaaatgaatctgtttattactgtaggcgtaccaggtagcgggaaaactacatgggcgaaagaaaaagcgcgtcaactggggaacacgctgactgtttcccgtgacgatatccgcaaaaccctttactgtgctggcggtgatctcactggctatcgcttcaccgaagagaaagaactgtttgtttgccgtgtgcaagaagatacagttcgtaatgccctggcgagtgggaagaacgttatcgttcacaatacccatttacaccaaaaagatcatgatgtgtggcgagagatcgcgaaagagttcaatgctgatttccatatcgaatggattgatgccgatatcgtagaactcctgaaacgcaaccataaacgcggtgtgaatgctctacctgtttcccgtgtctgggcgatgttcgaacagtaccgtaaactccgtggctgggttccggctatgagctatgcagatctgagcaaaccgaaatgcgttatcttcgacgttgacgggacattaaccaaagttggacaacgtagcccgtatgacttcacgaaggttatcaacgatccgcctaaccctcctgttcaagaactgttcaggatgtataaggccgctggttatgcctgtgttgttgtgtctgggcgtgagggtactgcacagtgcgcacatgataccgctgcaagcctgatcggatacgatgttgacctgagcgatggtatctacatgcgcgaagaaggtgatcatcgtcacgatttccacgtaaaagagcaaatacttgttgaaaagattctcgataagtattatcctgttcttgcagtggacgacagggatacaccagtcgggatgtggcgaatgaacggtatcccatgtttccaggttgattacggcgacttctaaaaaacagttgacagtgagtgcgggtgtgataagatacccgcacaaacaaaggagaatattatggttattcgtgaaaatgaaaatgtgatggttgaactgggtgatcgtgttaaagttgagaatcctgttgaacttcaactgaaactcaaccagttaggccagcgcattgctgataaaattcctgctggttatacagtgaagattgtccgcgatggtcagttctccttccttctgggtattttgagtcaacgtaacatcgttgaacagcagttcgggattcagtggaatccggtaactaaattcgtagcatgggcgggagtattatgagcgacaaaatcagaaagattcatcaggcatggttatgtactgaaccaacgatgcttcgttatggttgtgtgtttgggttggttgataatgatcctcaacaggacattgcaacaagtccggttgttgaatatgcgattccggcgaacaaatcgtttgttgaagtggtgacacgttcaggtactacgtatcacatcgttaaccctgataacgatttcatcaaagacattctgaaatatatggatgattgttaatgaaattcaaagtaatgaatatgttgagagcaatcgatcggagtcaacgttctcaatgtatttcgaatcgtgtaggtgctattatcgcgataggtggtcgtgccgtcgcgtggggcgaaaataatacggttgaccttgattgtcgttgcaactcatgcaacaatcatatggtgaatgatgacggtaaactgaaagcggttgatcgtcctgaacattcagcatggtcaaacgataacgaaattcatgcagaaatgaaagcgctattgagtgcgcacacaagaggtgttatactcaaagacgcagcactttacacaactgcatcgccttgccctaactgcgcgaaacatatcgaatggtatgttgctagcggggcgattacatcggtgtattatctcgataaatacgatcgtggtaatgatgaatggatttcacgcttgcagaaatatggctgtgtcgtggaacaaattaaacgggaagagttagaatcgtttatcgacttttccaaagtagtgtttaacaacaatgagtaaagaaatgtctgaactgaaagtaaaagcatccggcgaatatgtgatcatcgaagctactgcgcgtccgcagggttccgaaatcaaatctgaatctggtatcgtggttggtgtacgccagcacggggaacaacctttttatggtaaagttgtttctgtaggcgtagacgttccagcagaagcggcagaacgaatcctgggtaaatatatcccactgccaagcgctcacatggcgaatgttcctgaccctgatctggttgcgggttacatttccgaaaaagaagcaaaagagaaggaaacaaaatacgtttccgcacattacaaagcaatccaggcaatctacgagatctaaaaatggctaaatcaattcaagcaattatcgctgataccgtcagcaaatccaaaaagctgttcgacaaaggcgaaattctggaagccccagcgcgtattgacgtaatgacagcaatgatcattgatgcgcatcagggtaaacttaaatcccgtgccgatgaagtcatggcgtacatcgtccagttcgaagacgtatgtaagtacgcgaaagatgttgatccgctggttcgcgaaatctatcgcaaacagttctaaaaaatttgcaggtgtagttcaattggtagaatatctggtttccatccagattgttgagggttcgagtcccttcacctgctccaattcgggtgcgtagcgcaatgccgttaaatggttcggaatatgcaaccatatcccacgggataggctctgttggtatccggtaataggttccccggaatgcggggtgaagtaaagaaacttccagcccactaaacaatgtgagatctatatgagaattcgtgaaaagacggtgtatgactctaagttaggcaaaacaatccatacgttcaaagagattacgccagcgcaattcaaagagcggtacggcatgacattcaacgaatggaaagcggggttatgtaaaaatgactaccgatataaattaaaattccgtgaatgttatgttgatgacgatccttatgcagcagatgtatgtggtgaaacagtaccaattatcgagaattcgcccgacgcactaatacaatcttgtatagacgcagcatatgaaatttaaaagagaaaaatatgaaaggtcttcaaaagctgtttgaattaaccccaaaaattcgcgaaatcgtcgctgcatcaactgaaaaagaaatcaacggtaaattgatgaaactgtttaccgaagaaatcccagatttcgataacgaataccgtaaagcgttcgatgcgtattctgttgatggtttctttgcatcaccgcaggtgaatagcaaacacgaatatcatcgacgattctttgactggtcgatcgtcaatatcgttcgtcgaactgatatcgaacctacgaaccatcagttgatctctatggattcttctgtattctttatccagtaccttatcactggtggatttaaagcagaaggtattccgttctgcaacgaagctctggaagaagaattcgcagaagcgtataagtatatcaaagcagttcgttaatcaacaggctatcttcggatagccttttttctggagaagcacatgcgctttttaaaatacgcaagctggcttgtactggttccccttgatattctttctggtgttctggctattctgctggctcctttcgtggttccgttctacagtgaagaaaccggacacttacctaaagggttccgttggatggaaacattcgataacccgatcgatggtgatggtggacatatccggcgttgggctaacatccggtatcacttaggcgatctgggtgtgtatgcgcaacgtgtaggctggttgtggcgtaacaaagcgtacaacttcgcttatcacgtcttagggcgtgaagcacagtcagacttcgcctggaagggcaacccgaaaacagaaggtggttccgatccatcacgtcacggttatctgttgatgtggaatgattcggcatgggggctttatgtcttcaaaccgtggcttaaagtcggaaaggttcagttctgcttacgcgtgtattgcgggtggaaactgaaacaggaagtaactgaccctaacgggctggatcgtgcaatgctggcgttccatatcaacccgttgcgttattatgtcgtagaaaggtaatacaatgaaagcatatcagattttagaaggtttacacactggcacaatctacctggaagaaggtaatgatgttcgtgtggtggtatccaaaaccctcgaaatggattcagtgatcggtaaagctcgcgttgatccattcgcaaaacgtgaagtcgatattgaatttcaacccactgttaaagtggaaggtggacaacacttaaacgtaaacgtgttgcgccgcgaaactctggaagatgctgtgaagcatccagaaaaatacccgcagttaacgatccgtgtgtccggctatgcagtgcgtttcaattcactgactcctgaacaacagcgcgacgttatcgcccgaacctttacagagagtatataatggcgattgaagacgtacagggctataagccccactcgaaagaaaagatcgacaaagtaaaccgcatcaaggccgcagaagttgccctgggcgaaatcttcaaagaactggatgaagagtattcaagtgattacgcggtatcagataccgattcattcactaccgaagaactcgatgcgatgcttgaacgtatccatcaaatccaaaaggcgaaagaccgactgaaagaagcctctatgtgggcgtgtcgtgcggtgttccagccagaagaaaagtattaaaaatcaagccgttgccgaaaggtggcggcttttttcgtttttatgcaaaataatgcttgcactgaatcgtgagtgtggtaaagtacacacatcgaaacgaaacagagaaaaggaacgagaaaatgattaaattaaacccaatcgacgcagcaaaacatttcgtagtagttgataatggtgttgtggttgcagaagttaaggaaatcgctttctctgacccagacgcggaaatgaaaagaatgggctactcttaccggatcgagcacaaaaacggtgaagtagaatacgccgacgatatctctgacgttcaggcgaaattctaaaaagttgttgacctaatctgggggctgtgagaatatagccccatcgaaacgaaactgaggatgacattatgaaaacttacaacatgaaagaactggtttgcttcaacactcgtcgtgaagcccgtgcgtatgttctggctgctggtaaaaatacctctgctgtaatcgacctgggtactgataaagctgttggcgcacgttgggctgctgttgtggttatcgctgctcctgtgactcctgttaaaactctggttctgggtgcgcgtaaagccgaaactctgaaaaccagcacttgcaataacagaggtgttcataatgtcaccgtcatcaaaaaacgtagctttggtttgagggcttaaccaatgagtaccaaagaattagaacagaaagtaatggggttcatgagtaacagcgaagatcgctatgcaaaacacctcattgtcgaactgatcaccgcgttacgtcgccgcgacaaagagatcgaagaacttaaaaatgcatcggttcaggttgtctataaagatcgcgagcgtagtagctgggaaaaagaatgggatgcaaacccccaagaccgccaccttttcgggaaataatcatgagttccattaacacagaaaaagattttgtgatgtttgttggggtacagactgtaaagaaagatatcttcggtaaactgtacctgtcgaacgacgatcgcaaccccgcatcattcgaaaccgaagatgatgcatatatcgcgaagaacaccagcgataacgaagacattcgccagtatgcgcggatctataaccgtgaagtaacaacccgtctggagagagcgtgatgcgtgaaggtatcgaagtaagaacgttccagttcgaaatgcgtcgtatcccagaagcatcaatgaatctcattcgagagcacaacgtgaaaatcgtagaaattgatgcatacgcgggtactgatctttataatgatgcgaagattgacagcattgatttagaccttgagggtgatattggggatctgaataagctggctattgcattgaatgcagaaaccaacaaatacgggtatacaatcaaatgaaatatattctcgaatatcatgagcatcaaattaccgaagcaatgatcgataagatgcgggtatataaccaaaacattaccagcatcaaaccgctatcagtgtgtcgtgaatttgggggatactccttcgcgatgtacacaaattccgaagacgacgcaaccgcgtatctgaaaagtatcggtgcaatattcgacaaattcgaaaaagtatggaaggtaggtttctaatgaaaaagtattttattgaagcggcagatcgtatcgttcttgctctgttgaactggaaccgtcgccaggatgtctctatcatggcatcaaccaacgggacaacatatgaccgttatgatccggcgcgtggactccataagccttacgaggttaaagcgtgaagtattacggattcaaaacgagtcatttcggtaaagcataccgcactgacaacattgatcgcaaacgtccgtactatgattctctggtacgtgctggacgcaaacgcgctcgccaggaagggaagaaggaagctgaaaatgaaacagaatagtgaactggctttgattgcttttggttttgctctgggttgtatggtttctgcattactcgttaacttcgcggggtgatgatggacatcggatcaggtagtcagtatccatcatgcgcattgagcaacttcgccccgcatccgtttacgtttgacggggtagaatgtgcatcaatggagggctttttacaaagtctgaaattcagcaatccagatatgcaagcgcatgtgtgtacgctggttggtaaagccgccaagttcaaaggcaagaaaaagaaatggtatcgcgatcagaccctatactggaagggtatgccgattcaccgtgaatcagaagcgtatcaaatcctgattgaaaacgcgtacaatgctcttttcctgaatgacgggttccgccgtgcgctggctgcaaccggaaaaagtaccttgactcattcaatgggaaagaataagatgaatgaaacggtactcactgaacgtgagtttgtccgaaatttaacccgattacgggatctactatgatagccttgattgtcatcggtatcattctatacctcgttgttggtgtatactgcgccgcacgtttttcctggtgctttggtgtaagtcataacggatatcacacaccaaaaactttgcttttaaaacataccattttcccgctgatcgtgttattctggcctttcttcggtatatggttaatattcgcactattttttgactgagagttactatgaaagattatgatgaaagagtagaatgcgcgttcctgttcaaaggcgcgattaacccgctggcattactccacgcacagggtgctttgagttctaccctgattatgggtgttatctacaaagcgggtgtgtattacgttaccatcggcgcgaacaacattaacgtgatcaacagctacgttgaaaaatgtaagctgaaagatattgtgttcgataaagtcgaaatggatgttccaggcttcgacgctgtttatatgtacaagggttgatgatgggttacgtagtttatttcgattgttcagatcttgatccgttcgttctgcaacaagcaaagaaatatcatcaagatatcactggtatcagtgtcacgaacgatgatatgctgtgcatcgaatttgattattatcgtacatttgagcgtgacaaattccttgcggatattgaagcgtttaaaagtacccttttctttgatcgttatgaggttaaatcttgaagccagttattcttaccgacattgacgggatcgccgtgaagtggcaaagcggcctcccgttctttttgtctaaacacaacatgccgaccgatattgccctggatatggttacagatgaaaagttccgtgatatgaccgaaatcttcgggtgcgatcatcaactggcgaaaattctcatggaagaatacaataacagttcgtttattcgctatctaagcgcgtatgacgatgcgttgattgtgatcaaccgtctgaaagcccaatatgatttcgtggctgtcacggcgctgggaaccactcctacggcaagccttaaccgtattgcgaacctgaacacgctgttcccttctgcatttaaagaagtgatggttgtcgggcatggtgaaactaaagtacaccgctatctggaagcgaaagccaaatatggcaatcgtctggtttgcttcgttgatgatcttgcggtaaacttaaacgaatgtcataacgtcatcagtcagttgccgttattccatatgttgcgtggtgaacgtgaaaccccgtggtcgcctcaccagtcagttaaatcatggtttgaaatcgaagagaaattacatgatcttacagattctaaatgaactcgcttcgactctgaaaatttcagagaaggaagcgatccttaaacgtaatgcaggtaatgaactgctgaaagagattttccgcattacgtacacgaaacagattatgtttcacattaagaagtttccgcaggtggacggcaagccaggcacaaccccgctatcgaatgctatcgcggatttgatgtctgatttggcaacgcgaaaatatacaggcaatgcagcccgtgatcgtctgctggatatcgtatcatcggtgaacgagaatgaccgcgaagtgcttcgccgtatcattaaccgcgatctggaatgtggtgctggtacaacgttaccaaaccgcgtatggaagaaactcattccagaacagcctcaatgcctcgctacgccgtttagtgagaaagccttaaaacgtattcgcttccctgcttactcgcagcttaaagccgatggtgcgcgttgtatgtccgatctgctggaagacaagatccgcaaagcatcccgcgcggggaatgagtacgaaggtttggtgaatctggacaaggatctgaaaaagattcgtgaatatctgggttatgatgttgtacttgatggagaactgatttatgtccctgctgaaaaaactgctgtcgttccttcaaacagcgttccatttagtcttgctgggtttatgggcgatgacgacgattctgtttctgaccttgtggcagatgttaggcgggaagctaccgagaacgagacacaagcggaagcgaaacgcgaagagggcaacgggattgtaaacaaatccctgaaaggtactatcagcgacgaagaacagcgcaatatcgtttatgttgtctgggatatcgtaccgtatgaagtatactatggcgatgctccgagtgttcaaccatattgcgatcgctttagcatcctggaaggtgcgctggctggctctggtgtaacatcggttaagttgatcccttctatcctggtacagaactacgcggaagcgaaaaaggattacaacaattaccgcaatgacggtaaagagggttcaatcctgaaaaacgttgatttcaaatggaaggattcacgcgttgcggatcaggtgaagttgaagaacaaaaccccgatcgaactgcgaatcatcgacgtgtatgaacacaccaaagaacctcataaggttggcgggttcgtggttgaggacttatcaggagaagccagaacaaacacaggttccggtctgactgatacggactaccgatacgatgaagacggtattaaccgcgtgtacatcccgttagaagaacgtggtgaactggatcgcgaatacattatggcaaacaaagatgactatatcggcgctatcgtcgaaatggaagttgacggactccagaaatcgaaaacgcgtaagaagggcgaacctgagttcagtttcttcctgccaatcatcaagaagattcgacgcgataagaccgaaccggatgatattcacgttatcttcgctgatctgttttaaatagcactttttgctaaagaagccccttgcatatgtgaggggctttttgtatattacacacatcgaaacgaaacagacaaaaggaacatcccatgcaaatcactaaagaactcgaaggtaaagtaatcgttctggtaaatgaagaccgtttggcacaactgggtaacggtggtgaaaaactgccagcggacgcactcgaaagcctttctaaaatgcgcgtgatgcgtgttactgacggttgggttacttgtctgcctctgaacgacgaagacaaagccgtatacgatgcacaagcggattcatgggatatcgaagtacctctggtgaacatcgaagttgaagagtgctacgaaatcgaaaaataatgcttgcttcctgggtagtgtagtgatacattacccacatcgaaacaacacggaaagaggaaaagattatgtcaatggctcacttaactaagaaagcggattttctggctctgattgctggcatgaacgcaccgcgtttaactcgcaacaacattcaggtgtatgtgtttgacgagaagccaagcaataacgaagttcagttcccgactctgatctattgcgcttctaatttccgtgaagaaagctacatcgcagcacagaacaaattgtggaaattccgcgattggatgaacgaggcgaaaaatggttgatatgagtaaagaagccgttgaagcacgggttgcggaagcgctgaaagatattgatttcggtcgcttccttgataatgctccaacgataccggacacaatctgccttaattgtgggcgttgtgttatggttggaaaatgctgtgataacccgaatattgttatcatggaaaggaaagaagtttcggaagaagtctggaatcagattcaggaaatcattaagaatccaccagaaccgacgaagcgtttgcgtgaaatcatgagcaggaataaattatgaaatcagaaccaagtaaaactatccgcctgatccgttgggaagggcaagaaatccgttatgaagacgacgatcgcgaattcgttcatgaaatgcttgctcataatctggggttcaaaaacgccgcactggtgatgatgcagcaaaccagtgatgaagacatctggcaatgcgtcattctcgatctggacaaaaacaaggattacaccgaagatgaactgttcgcgctcacagagaacgctacagcgcgtcagaagtgcttcatgatcgatatgcctcgcgagaactacgagaatatcaagaaagcccgtaaacagaacaagaacaacgtgttcgacctgttcatgggctatcatgaagaaactacggcctaagcctcactggttttgctggtgtcgttcgtagccgctgccacctgtacacattccaatgtttgcaggtggaaatcttttgatacatcgcggatacattcaacgatcagatacttccctgaatattcatcccctaacacctcaatcaatgcccccactttaacatccattcgaccctgattgatatcaaaccgaatacgtttttcataactggataacgtctgacacttaacagcctggaacggttgaccctgtttgtctgggttctggaagttgttctcatataccgcgttcctgttcatggtgatccatgcgttttcaatatcggtactcgcaaggatatcactatacagttttttatccgtcatcgagaaactaaagaaacttgcatcccctaacagggtagtgttatccttatgggtaatgtattcacctttcgtgaataccaaagcgtcacctaaaaacgggttacttacgttgaacttgtaagcctttaacggggtttgtgcgaggatctccgtattgcttttcataaagataccggaaccatcttcccacaaataacagaagtcagacgaatctacgctctgcccgttgtcacggatgtaatcaaacacggtttcatacgtcccgctcaggcaagccggaggaatacgcacgtttgatgcgtcgatatgcggcgtgatcaacttcatatcgttatacagtgccgtcatgcactctgtaatcgtctgtacggcgttgttactgaacgaacgggaaaacttacgacgaaacaccgtatgcaccggagaaaggtttaggcgcagtatagagcggttcatatcatcggtttcgacgtttgaatacagaacaccgtagtaatgctgttctaacgtttcgttatactggaaggatacctgaataatcggtttttctgtcaactgatagattaactggttatcatagatctgcatcaatgtttcagaagtaccgttaatgatggttttctcactcattgagacaagggcaggtaacaattcaagatagacgttatcagcgaacttttcatatgttggatataatttaaccgacacgacgcggtttataactttactggacattagacatcctccctttatattctatttactaaatagtaaatatcgggatacttgaggcgatcatgaaagagaagaaaaacacacttgataaatttatggttacgcgtttaaacatcaagaacagcaaaaataaagtagtcacgttgcctactggtgaacaggttacgatcccccgtctgggttatcgtcatttcacccagattaaagcaatgaaagacccaatgcagttgcttgagtatatcatcaaagagattcaaccgcgcgaattaaccgcagcagaaaccgaattccttttgattcacctgcattatcataatgacgataaggcaatggcgatactgaaagagatcggtattaatctggatgatatgaaaatcagcgaagctaagtatgaacatacttttgataaccttcgattggtcttcaacaaaccgaccctaatgctggatgatctggcattactgcttaaagaagcgtatgacaacgggaagccgatcgaactgacggacgaaaaccgtattcaattaattaactgcctgtatcgttatgaatatgacgatgtaaaacgtggcgtactccaggaagtctatattgtgcatgaggggaaaaccattaaagggcttaacatcatcggtgaatgataatggctagcaatccatattttaacgaagaacaacgtcgccggatgcagaatccaccaaaaccacaggcgcaaccgactgttcgtaagatccaggcaacgttagataaagattcgatgcgtgagttaaaggatatcaatgataatacccttgaaaccgcgctgaatacactggacatcaaagacagcgtgaaatcctttgaggatcgtttcaaagagaaattcgctggcttccaggaacaatacgaacaggatcagcaaccacttgctgaacagttgcccgattttgttgggccagcgcgtccaccatcattaacagacaacagcacaaccagtgttgataactccgtcagtgtatcgaaccagcataacccatttgcgaaaatcgaaacatacaccggaacgattgcagaagcaatcaccaagtttatcgaactcgctgaaaagaaaccagcccccgcgccggaacctgaaccagtaccggaagaggaaccggaggtcgatcgggacaagaagaagatccgcgataaggataaagacgagaagaaattcagcaagaaagtattgtctttgctgggtgcaatcaaggataatacatccggtcttctggctcgctttatcggttattctctcgaagcgctggcgaagtttgcaaaatggactctgattatcggtagtatcgtatttgcgatcgacgtactgagtaaggttgttcagaagtggttccaggatattcttgcagagggtgaagcctcgaaagatttgtttggttcatacttcgggaatatcaaaacccttgctgagaaaatcaacgaaggtctgcaaaacttcgatatgagtaatttgggcgaatcgctgaaaaacttgttccttgaaccgtttaaggttctgggcgataccatcaaaaccgcaatcacggaaggtatcggtaatctgatttacgctctgggtgaatataccggatctgaaacgattaccaacgccggacgcggaatgaaagtatcagcactgcgcgacaaacaaaaatacggtcttgaaattgatcccgatgatctgattctgctgaaacagcaggagatccaggatcagaatgataaagtggttgaggcacgttctaaggttgtcgaacaggttaaggctacccagggcgcattctcatatagtttcggacagcaaacagacgcacagaaagcattgtctaagcaattggaacagatgcgcgatcgtgtggctattgaagaaaagatcaccgaagagaagaagaaagaactgaaagcattgcaggaaaaccccgcactgttacaggctgaggttgataaagagaataccgctaaccgtaagcgcgtggacgaaaccaaacagatcgaagccgcgcaagcgaaagcgaaacctaaagcggataatgaattcgatcagggtgatgaaatcctgaacaaagacaatctgacgggcaacgataaaaaggtaatggaaaaactcatagaatcgcttgaagagaaaaacaattcgaacaagctgaatgaggacgacaaagaccgctatcgtgatatgatctcccgctggcaggaaaagatcaccacagtaccggaaacgagtgcaagtattgacaagcaaccggaagcagtgaaagcccctgttcagcctacaacgcctaacagcgttcaggtcaacaacaaaacagtaaacaacacggttcagcattcagtacaacgaactgaccgtaaaccattgattgcattagcttaaaggaaatttaaatgaaaattacagtattgcaagacactgtacaatcatttgctgaaatcaaaaatgctggcatcccctctgggggtgctgcaacaactaaaaacgcgttgactcaaccgatcgtaacagcggaatttccttcccaacgtgcagcaggtattgataacgcttataatgcatcaagcctgtataataacggcttgctgttcacagcatatgatttcacgggtggacttgcaccaggcagtaaagacaactaccgctcattacgtcaggcagcacagaacgcgcaacagatccttagtgctaacactgggaacgttcgatacaaacaggttttgaatacccgtactatgggtacacttaaccccatttgtcaaatacttttaccgcgaagcctgaacgataacgaagtgaactcacaccgttatcaggatgcaaccgatagtattgttgctaaaggtttatcccgtgcggtatcaaacgttatctggggcgctgtagaatccgtttctggtggtattctggcagaccgtagggaagcaatcgacatcggtacgaaagcagcgtttcaaggctctgataagcgcacaaagatgtattacaatacattcgttatcgaaagccgttatgacctgctggaactgattaaaatctattacctgttcacggtgctgggttatggtactacttcgggcggtactccagcagaattagccggactggttaaacaagcgtataattccagtgcttcgaaggttgcaaacgtttttgcaccatcaacaaaccagacgacagcaagcgatttcaacggcagcatcggggatcagattgttgacttcgtatcgaacgttgaagttattaaatcgcctcctgtgtggtttattcgtgacttccagacaggtgacagtttgcggttccctcattccacgttcgggccagcaggtattaccagcgttcgtttcgggcgtacaatggacaacattgtaaatacgttgagagaatcaccgaacaccccgatcgcagttgaaatcgaaattcagtttatggaactgatcgatatgcgtcaggattcgatttttgatacgcagtattaagggggaacaatgttctatagcgtagatgaatttttgtcaggaatggcaaatagagacttccagcgaagcaacctgtttagtgttgtattcgcaaccagtccagcatcacgcattctcgacagcacgatcgggagtatccgcgatactttaattgatggtactatgagttccattaacgcgaataacccgaacgagttcatgaacgctattacagggggcgtaagcaagctattcagctatacggttgataaagctattatgtccctgaacaaaacaggtttcagtaaaatcatgggggcgttaagccctcgtttaattacttccctgtttggtgatagtgtttacggacagatgctaacagaattccgtgacaaaatgatgtataatatggggttgagcatcgttggtgttcagttgcctggtaaaacactgggttatgaatacgtgtataatggcggtgtaccccagatccgattcacccgaccggagaatggcgaattatcgctaacgttccgtgtggattcagaagcgcgtaacctgaaagtattcaacgaatggttgtcagctattcgtgatgatgtctcaggccagttcgcattcattgatgaagtatcaagcgcgatccaggtaaacttacacaatcgcgatggtgtcccgcacagcacgtatgtattccagaagtgtttgcctgttaaagtcagcaacccagaactgagttatgaaagcaataacgaaatctggacattcactgttgactttgcctataaaacaggctggcttgttgaagcagataaagaaggttgggacggattcaaacaatcacttatcgaaggggcagcaattgccgttcgtggtgtggttactggacaataaggggcgaaagccccttttgaggttaaaatgattgacataatccgcgtaaaactccctggtggagtgaagcgattccctatgtttaccgtgcgcgatcagttgagtttcttactcacaagcgcggacatggaagggaagacgctcacagaacagcaagaaatgctggatgaaattttagatattatgtatccgggttattcccgcaccgaacaggaaaacattttcactaaggtgtattgtgtatcgttcggtaagaacgcaatcaagatccgaatcaaaggaagcaacggacaatcagaagcattcatgcatgtaactgattacgttttgcaaaatgaatatgcccttgatgattcgcttactctgggattcaaattcccgaaacatcgtaacaacagtgaacaattattccttgaatgtatccagtatgtcaagcaggacggcgaaagatacgaatggaatgcattagacgaggacacaaagaacgcgatcctggatctggtgtctattgaagatatggaaaatatcgttaaactgttacgcaagtcctgtcatgttaccgtgcgtgatattgagttcagcgacttattgacactgtacaaaatcctgttcaacaaatcagaactgaatgagttcttcaaaaccaactatttgttaaataagaataccgtacagattgaacctataatgaatggaagcccgatggaacgttcaatttacgttgcattgctggcggaagacttgaaacgaaaagagaatgcaaatgcgtaaacatacaccccgacatatcccaaaatataatgtgacttatcgcccgttaaccattggcgatcttgatgacacggataacttcattattgaaggtgatgtgttcaagcatcagcgcgattatgtttacattatggctctgttcgacagtatcaacaaagagactgtagatctccaaatcaaatgccctgaatgcggggaactgattaagtttgtgctcaatcgtcatcatatcatggtggatgaatacgaagaaaagctgtacggcaatgagatcaagatttcagtcgaaccacaccgcaccggaaaggaagagttacccgaactgattaagtttgtagtcatcgacggtgaacaaatcttatgggatgactgtaaagagtcagagaaagaagccgttctggatagtatcgactatccggtctttaaatcaataaatagcgctctggataagccagcaatcgttgcaaacattccggtaaggtgttcgtgtggctacgagcatatcgttgcactgagaggcttagaggcgtttctaaaggtggttggataaaatgggtgttaaccttcgcttactgtatagcgatatcgatcccaacttaacaaaagactggaacaatgacgtaaccgcctcgaaaggggcggcagcggtaaagaatagtctgatcggtatcgtaacaacacaaaaaggcacacggcctttcgatagcaactttggttgtgagatcggggaacagattttcgagaacatgaacccgctaacagcggaagcagtaaggacttcgattgtctccgcgatccgcgcatacgaaccccgtgtttacaatctggatgttgaagtgattccgcagtatgacgaaaacgcaatcaccgtgacgatttactacagcatcattgatgaaccggaagaagtagaaagaatcaaactccagctatcatcctcataacaaaaagccccgaaaggggcttttcttattccatcacgatccagcccattagctgttgatatcgcaattcgaacggggtgatgaaagagcggttattgataaccttcgtcccgttataggacttaatcacttcctcaccacgaagcacatattcgtatacttcgtccatcgtatcataacgcacttcttcgacttcgaagcagaagttggaatattcaatcattccgatcttgtttgcgtaacggcgttcgatgcagccctgtttttcaatctgagtgatcgcagtatcaatgaactgcgcaagtgcttgcatgaaattaccacattcgacttcacgacccccgcttgagatagccaggtaaacgcggctcaatccatcattgccgatgtaaccgatacagtcaccgccaatatagacagaccagactttacccatcggccccatacccatacgattctcactacgagaaacacctttcagtaacagtgccatgataccgccgcgaacgtaattcattttcatgataagccccttattttttcaggttgattaaccaagatggttgggtttctaaactaaccgctttccaagcatatgcaacactataaccggaatacgtctgacatacaacagcattttcatttaaatatttcactttgtgatctgcctcttgttcattcagggcagcacacacgatattcttttcatacactccgccgtttggctggataatggtttcttcaatcagataaacgctgttcatgctaattccttctcaattgcttcgatgatgtggagaacgtaaccgttcagttcttttgctttatcagcggcttcaaccataccgtaacgaggaacttctaaaacgttcgcaccttcgagcaggttgctttcgatgtctacgattacgtagctctcaccgattactgcgccttttctccagtcttttacgaacttcaccattttagctttcatgttctcgttccttttggctgttccgtttcgatatgtgtaatataacaaagccctcacgcgaacgcaagggctttttgagttaatgcataaaagatttgacgtacttcacgatttcttcacgacacatatcgaccggagtatcctcagcaatagcagcatgacagaagatttcaccatccagccagaacgatagcatgtactgaatatcccgaccttcgttttctttctggtgtttcttgatgcgatcaaatgcatcatccatgctttcggtagctgtaagcatttcagattcacccgctacagcagccatttccccagcttcatcactgaattcgctttccagttcttcccagtatactatcgttatcatggattaccccaaacagattttacatttacagagaggacattccgcctctttaacgcgcaagcgctttgttgctgttcgcttcgctgtgttgtgatcatacacatgcaaacagcggtaacagatcaccaatcgtttagccgtcataaccaccaccgcaacgaacatcaccttcaatgaacagttcgcggttatctctcaggagattgtatttcttttcgagttccggcccgaatgcgtccgcgtcgtcataccagtcatagttataacttccggtttcatcgtcgtattccggttcgtcgccgcgctcattgaagtgaacgattttaacatcatccagattcagttctttcagcttgtcccaaatgcgggttatttcgacgctattacatccgaacgcttccagtgtgattgtaccgtcatcgtgtatttgaggcgaaccccagcgaggacgagtatcatcaaacatatccatcagagattcaacgtttgactcaccgtaaatctttgcaacttcctgttctttaccagggcggacaagtccgatcccgataatgaaactactgcttgagctattgctcacgaacccagaacgaatcttcatcgtcttgcctcatatttcgcgttctccgcgattttctcatgatacaggttgtatgacaacaccagcgggatacaagctactataagcccgatgaccgccagttgatattcgcgtttatcgaacgccataaatgcgatcgtggctcccagaataaacacacctaatgcaatgatgaagaataatgtcattttggcagggtatccatttcacgagattttgctttcaggatgtcaatcacagtagtcatcgcctgttctacatcaccatcatagtgaatcaggaatgttttgtgaagtcccatgatcagacgattgatgatataagccatttctgacggtaacagtttaccattctggcgatcgtactttccaaacaagcggtagagttctgcgctgttgcctggcttctcaatgctgaaattatgcatcccagacagaataccatccagatacagaacagttttgttatcactgcgcaggtgtccaccgaccttgtagtagttgctgaacacatacggcttttcgcggatatcttcgatatcgaaatcaccatgatcttcgatgttgccaacatgggcgaagaaatgatgatcttccagttcgagaaggattgcaccctttttgtaagggaatccgactaaatcaatctgccagccattttcaccgacaaatacatcatcaacaaccacgaaatccggcagcataggcgcgtatgcgtggttcttttcgttgttttcacgataggcttgtggttcggacaggtacaggatatcgccttttacaacttcaccccagaatacgttacgtgacatattattttcctcaatatgccccctttcgggggcggtcattgttagattttgacttctttttcttccaggacgatttcacattcgaatgatgtggtttcccagactttccagaaatcggatggaatattatcttctttcggaagaatatcttttgcagcgatagaaactttggtttcttcgaagtccagatccgcgaaccatgcatgggctactacaacaccgtacattacgcgacttaaacgggcattcagtttacggacttcctgaatcgttgcctttgtctgcttatcaagatactcgactacctgatctttgtcaagcgcatccagttcagatttcacctgatcgtaagcccacaggataatcaggtcgccgttgttcagtttcttcttaccttcgtcacgtttcgcgacggtagccgctacagcaggaagggaggaaacacccttgattttcacgttcagttctttcgacatgtaaacatcagtcgattctgtgcgctcaaccttcggagagaacccgtaatcacgaataccctgttcagacagccattcacccgcagcctcaccaaagcgctgtttcagcccttctgcgttgcgcagtccgatcgcgttgtcacggaagaacttcataaccttctgacggcctttcaggatttccagacgcacgttatcagtcacgaactctttaccgcttaacccgcgagtcatgccacggttaaccagaggcagagaggtaaagtctaccagaaccgacatacgatcatcaccgattttttccagcggcttgatagtcaggccagaagcacgaaggtttttcagtgtcggaatatcggtttccagcggcagaactttaacgttcacgataccatctttaacgatggtgaagttacgcacctgcttagtttcgactttttccggcagaccgaattctttctgtttgctttctgggatagtcacatacccttccagatccgtgttgatggaaatgttcggacgggaactgttacccaccagatgtttaaccgatactttggttgtggtttgggtaaatttcggtgtccagacttcatgcgctaccatttgcgccgccagtgctttacgttcttctggggttgcagcgtttgcgatctgttcggtcagttgatccagtgtatcatcttctttctgtacagtctgacggcctgtgcggttatacgcccagtgctcagaagacaggtcgatcactgtgtcagtttgtgccagcagttcgagcgcatcaaccagagtgaacgcgttttcgtctggaaccatgttgtaatcaataccatcaacgaaacgctgtgatggatctacaacagcctgtgcaatcaggtctttcgcgttggagtagtcctgtttggtaaagcagttgtcatacgctttgatcagacggacatcacccagcttttgaagcactttccatgccagatcagggttcattgtgtgcagtgcatgataaagcacgacatacagaacttgctgttcgctggcgatgttcggatcgaatccgtcaacatcattaatcgcgttttcacccagcgcccagatgtttttgatgtgttctggaaccagcacaacaccgtttgcagcgttcaggacatacacgcgcccttcgtccaggtagatcgcatgggtagcatcagcaactttgacttcgatacgcgcggaagtctgcgcggtgatgatttcgttaaatgctggttcgtatgcgtcgaaaccttcaacgaatttgtgcaatgcgttggttgcttctgccattttttccagcagaggacggtttacataataaccgtattccaggaacgcgatactgttgaaagtcagtggcagaaccgcacacgctttcagaatatcatcggtacgccagcagttatcataaccgtctgtcaggaagatcaggctgttcaggttgccgttttcagattgcagatcggtagcgatttccgcagccagattcaacggctcaacaaagccagtacaacccgtaggtttcaggtaacggtcgatagccgcgcagatgttagacaggtcagagacattgctaaccttctcaccacggaacaccgtgccgtaatcgcctttgctggagaagtacaggatcgaaacggtgtcatcctgtttaaccagactcgccaggtttgctttcaggtgtttacggatcttaggcagttcgttgtacattgaaccggatacgtcacacacgaaaacgtggtttgtcggggttggcttcgatacagcgtttttgaattcgatatttgtgattgacatttaaattttctcgtatttgaatttttctaaaatttcgttaactttattgcttactgcttcgactgtacgatcacacccgaacttacgcgccaggagttcaacgtattcatccatcgtagtgagtttggattcagcaacgtcaaacgcaagcgcatacattaccggattccatacccgaacgatttggagagtatactcgttcagttcaaatcgttcaagatattttcgcaaagaaaatacatcaaacggtgcggggcgatcctggctaaaggggatcgactcccctaatgcatagcgaggcataacaacacaaacttctgttttcagtttattatccatcagtgatgactctttgatgtgtgttcaaggttacggaagatgtttccatgttccagttgagttccgatcgggccgcattcatcggagtacgtgaattcaaagataaacacgccgtcctgattgccgaacttcgtgttgtattcttcatacaaccacattttgatcagagcgtctttctcttctgtgtccagatcgtaccagtctcgcccgtcatacgcaagcgcaatttgaggatttgaacggtaacggttttccgcgctttcttcggtttcccagtcatagcgcttatcgtcgtagaacgattcaaagctattacccagatgaccgcctaagtcacgatgaacgtgattgaccacttcttccgctgtcaatggcggatcgtagtaaccacaatcagggacgcaatcgcccatcatttcgcgcaggttgtcgatattagtcggatctttcgggaaccggacgatgaaactacttgatgaactattgctcacaaaaccagaacggattttcattttacatcctcaaattgtaagttttctttggttgcgttcgcaatggctttttcgttgctcagtgttactatgcgcagacgttcgccagtaaagccgtcgcattcagtgatactcacccagtcaaaaggtttagccatttcaatcgcacgttccagcgatacggtagaaccgaccaaatcactaaatgtatagtaatcttcgcttaaactttcaacagtataaattttcatgatactttaccctttgtttcggatttcaggacgatgttactgtaaggatcttttgctaccagttcccacaggtcgccaggatgttccccgctacggtagacggatgaacggatgatttcgttaaacttgctcagggcttcgtcgatgtcgtcatacccgcgtttgaggggcttacgattgcaacgaatgaagaacatttcgttggtattctccccgcgttcggcgtttttatttttcattcgatcaccattttaccaataacttcttcgtaggtcacagggttcggttcataaccgttagcgcctattgtatcgcctactctgttccccaccaatacagcaaccgcaactttcttaccgtctttccatgcgatgaattcgagatcatcggcaacatacgggaaggtttcgtgattgttcactgcgtcgatacagtccagaatagtatccgatgcgcaaatcagattaccaggctcacaatcaacaagacattcaacagtatagatcataataacttcctcacgaaaaaagcccctttcggggcttgattaatcagtgtccgaacacaccacggatagactctgcgaaagcgtacagttcagggtttttcgctttcactgtttcgatttgttccaggatgtaatctggtttgtatttcgcaccgaaccagcagtaagagaaagaacgatcccacatgaacacgttgtagtattcaccgttacgcacttcaaccatcacgtaacctggattagaacccagcgggtaatctttcaggagattgaatttcgcaccagcgccagtacatccgttaaacaggtcattaaaagtcatggtatgttccttttcagtttcgtttcaacaaggccaatatattacacttcgttaaaccatgcaagatatttcttctcttgtctgttcaaaacgtcataacaagaggcgacacaaacggtttcccacacaacttcatcgtaagcattcacgaagcgaatgatcagagttttgccattagtcatcaaagccggagtgaacccaagttctttaaccgcttttactttcttctggaataacgctttagtcatgttagccattttgtgtctcctttgtttcggtaaagctaaggtatcactatcaactaccggatgcaaacacttttttaaagaattttgtttccggtctttctttgtacggacgcattaccaaatctttaccgtccagcacggttggcttaccttcgagttcaatcaggatgaagttgcctttctggtacttcaatacgccctggctggcagaccattcatcattttcccagtggttgtaatgccattcaacaacggtatcgatcgggatttcaggttgatttctcataatactttccttatctgttttgctattgcctcgataactggcacggaaacggagttacccgcttgtttgtatgcctgtttcttactcgatggaataataaacgaatctgggaagccctgcaagcggaaacattcacgcggggttaatcgtctggggttcttcccgtcctgcaataccagacattgaacaccgtctttgtaatactgcgctgttatcgtcccagtgtgcgcagaatcgcttgtgacggcctgataaccgaaacccttaccgtttgccttatttcgttccttacgctctctaaagcctttccatgcgttatctgagagggtgaatgaatcatcagcatcttcgaggatgtcgcctacgcgtgtaggtgtacgcgggggaacaggaaatgaaaagaatacatcatccaggaagcagacaataaacacgcgttcccgtctttgtggtagtccgaaatcctttgtgttcaggcgttgatagaatacgttgtatccttcggcctccagaagcccgtaaatcgttctgaacgtcttccccttgtcatgggttagcagttcaggcacgttctcaaagaacaacacacggggctttttagcgcgtataatgcggaggatttcaaagaacaccgtaccgcgtacatcatcgaagcccagtttcaatccggctttactgaacgcctgacacgggaaccccgccagcaggatatcatgatccggcactttgttttcatcaatggcgaatagatcaccctgtaggttatcatcgccccagttttcgatatatgtttgctgtgcgaacttgtcgatttcagacgttaaaaggcattcgacaccgccgaacgccttatcaaatcctaatcgaaccccgcccacaccagcgcagaggtcaattattttcatacgtcaaaatcaatctcgtcgattttgtatgagttttcgtcaatgtccgcccatagggttacattaacgtgtttgctatcttcgtacaactggcgaccatcaatcccgcccgtgtaattgctttcggtgcgttcagtaacttccagtcggaggctatcgcgcatgatctgaacaacagcctgttccagtgtaactgcgtctgggtttttggtatcgcccagtacaacatctttaacgttcaaaataacatcagtcattagtgccactccgttttaataccgtgtcggtatgcgtcaatccccagtggggtaatcagcaaccatgctttcgaattatcgtgataacccgttacccttcgagcgtaacctttttgaatcagggcatcacgccctgatttgctgggtacgtcatcgaaatctaagtctagcactttagttgcgtatccgtaaagtttatacagaacatcaatttcagcgccggacaatttaggatacatcatttgtaataccccacaacatgatcgctgtatacgcgttcgatgaaatcgttccagaattcgcgatcaacttctttcggatatgttgaaatcgctgcaaggcgttcgacttcacccatgacttcttccagtttttcctgtacggttgcgaacggtacgccgccagctttaaccagtttcaggaatgcgctatcaggcagaggataaacgatatcaccatctttgtaaatctggatcaactgcataccaccgcgcaacgcgtgacttaatgctttccagtcgatcccgttgttggcttctgcttgtcgtgcgcgttctccgtattcatcccagagtttatacactgacttgcgcatttcatcggctttgatcgtgaactggaatttacgccccagcacttcatagaagtcctgacaaccagatttcattgtcgtgtcggtaacgaatcggcagaactcgtttgtagggaaacgatccttgatgtcagacactttcacttcacgcgtatagcgtttcatatctggcgtgaattcctgaataccaccgatcgtttcggtttctttcagtacatcaacaacttcgcgcaatgcagccagtcgggaacccttcacaccatatttcgcggcttgcttacgaacataaccgaacaagccagttagttcagtggtgtaaaaacgccagcggttagcgcggatatactgccagatttgagagttaacgatcagcttgtcatccgaagcgtgaagcatatcgagcgctacggtatcaccatcacacgcaagactaatgaacttagtcagactatacaactgacggtcaacgtcgtctacggtgtttttagagcttttatcgcctgtgctggtgtcaatagtcttcggggctttccccaggagaatatcgcgcgggtgcgggagaaagatccctttatagtctttgtcgcttgtcggtgtgttcagtccgtacaggtgagaaccgaacacggtttccattacagttttcaaaattcaacccccagggtttttgcgataccgcgcagttcagcggtagtgatatttggtacacgcgttacatgtccacgaccgaacgcgtctttgattttatcagtaagttcgatacggtacaaatgttctttgtattcgtcttcgctatgataaccctgtgtatgattattccagtcattagcgctacctgtttttcgatcaagtcgctcaacacggaaatctttaatatcggtgatatttggatcttccgacgcatacaggtattgacgggcaaccttgatcacatacaaggtgcgaggtcgtggggttttgtgatgactgtatcgacgaataccaggatcaaacagggtatcacccactttcacatcagttaaatctatcatttcattttccaacgttttgacttttcacagtagaacaccggaagacgtgccagaactggcttcactacgtcttcccctgtgttcgtgttatgaaccacttcgatcgtaagggattgcccttcggacggccttacaatgtccagttccaggatctcacgattaccctttgtattgatttccgctacgtagtaatcgtgcccgttgatgtttacgacatcacccataataacgctaattgtgtgaatcatgagtatgcaaacttaattttaacattcagggaatccagcaggatcgcgtcacgtccatcaatgacggttaatcccatgtatttgttatcgtctgcgctcttacgggagtacatgcgacaaaccagagaaccatcttgtgcgatgtattcaacatggtattcacggcgttctgacgtgaagatgtctccaacaacaaccggacgatcgacgggttggcgtttagtcccttcgaaggacagtttaccgttaccgtctacggcgcattcaatacctttatgcgcgatgctcgcaacagtaacaggctctacagttccaccgatcagcattgcgggttctttggttcccagtttcatcaccagcgtttgacgaatgctacttgacataggttcagtaacaaacacataaaccatatcatttttatcacgcgcaactgattgcaaggtgtaattctttgtacctacagaacccgtgtgtttaattcctacacgatgtccaggttccagcgccatgcgacattttacatcagagataccgctaagggttgctactttcatgatttaattccttcaaagtcttcattagatttccagtacacgttaaagttacggcaatcgtgatcagaagtcaacgtatatttttcttttgttttctcgtcggtgatcaccatcgtttcattttcgatggaatccacgccatagacaaacactttatcaccgcgcttattcaggaacgcgtcacctgtttgaatcaactgccagcagttgacaggtaaaccacccgcgcagataggacgggttactaaacagtaaggatgtttcattaatccgccagccttatattgtttggatcaggaacgaatgtatctttctgggtaatcatgaacaccaggaaagcagcgacttcgggatcttcaatcacattgaacttgcgattgcctttccaacgtaccgcgattttaccatcatcaagttttttgatttcggctacttctgatttcttgctcataattacctccttcgtttcgatgcccctaatataacaaaagccctcacgcgaacgcaagggctttttaatctttttatcagagtcccgtaaaggctacgataatctgatagtggtcatcgaagaactcaccacgattttgtttgacttcgtgcataggcatccagaacgcgtctaacgcatcgtcagaaccgcccataatacggggcagacttccatcattgttaggttctaacttgatgtactgcgccacagtcggttttgagaagtatacggaacgtttcggatgatcgaacagcatcgaattacggattgaaccacggataaccttttcaggaactttgatccgcacctcttcgagcagttcacggatcgcacaatccaggaacgtttcatttgagtttttgtgtccgccaggaagggctaacgcgtctttacctggggcgaacttacgacgaattaccagcaggtgattgttacacacaaccacactatcacccgtgcagcagttcagcgcgtcggggtatgggtagtttttgaatttctccaattcgctttcccatttctcgtattcgtagaataaacgccagaacgtgtcttccatcatccatttgtcgatataatcgacggttgtttgaggaacaaagcgcagcagtttcttatcccatccgtttttgtggttgaaaataatcggacgcagatcggttgctgatagatccttgccgtcaacccgaacaggatcaacaggtacgtgtgtccatccgaacgctttaagccagtatgaacccgcatctttttcgtaaccgtagatagcgattttgtcgcctttggtttccctgatagcagtacgaacagaggttttccatttctcttcgttgtaaagataatctggaatgtgttcaaactgaacacgaacaacatcttcgatcgggaagttagcgtttaaccatgagaagatcatcgtttgacgctcacgcgctgtcagagggtttaaaacgttagggtaagcgtaagctgaacccaaaaggatgtaaacggtttttgcttcttcgagtgctttacgcaccattgctgcatgaccattatggaagggttggaatctgccaattacgacagctttatcaaattgtttcataacgtgctccacgtttaaaggttaatcataaaacagacgcaatcaccaatacaccaagaaaaccgccaataaagccgaagaatagcgaaatgaagatagtaaggatgatctgttttatgttcattatagtattctcgttttaggagtcaagcccccagagtgggggctttaaaaccttatttacgagaatcgaaaatcacttgtccatcgtaacccgcacccattacggtatgtggaacaccgccctggtatttctctgcgcgtttcatctgaacgtcaagttctttccagcgaatcatttctggtgtaatggtacgctgcaacacggcgttcgcttcggcttctttcttagccgcatacagacgggcatcagcatcacgctcgttagcctgtgcagcattgctacgggcttctttatcggcaattgcctgaacaaccgcctgttgagcgatttgctctttacgtgccagttctgctttttctgcgttcacctgttcttcacgaattttcgtgttttcaacctgcttcttgatcgcttctggcagatcgatatcctgcaagaatacctgtttcacggtgtagccgtaaggacgggcatactcttcaacttcctgctgaattgcgatctgtagctggctttgaacttctgcgttatacagatcctgtgctttcggtacagatttaccgaactcacggacggtagacagaagtttttcggtcacgtacttatcaagcgcctgatcctgattacccgcgttgatacggttgatcggggctttgttaccatcgaactgcaacatcacggtcatatccacagtggatttgaatttatcctgggacggaacctgcaatttgtcaaacttcattgcgatgtctttggtgttgaacacctcgaaatcagccagtgggtttaccaggtggaagccaggcagaacaggcttcggtgaaactttacccatgaaggtttgagtttttaccgtaccatcctgaacgatagtgtacgagttcggaaccagccacagtgcagcgattacgcccagagcgatcagagtggttttctttgggttgtttacgatagtgtttaagttcatcattatttccattgggtttatgtttcaattcgatagttattctatcatcactttttcgcgtgtcaaactctttttaagaaagttttgtcagcttgtaaatcgtttgatagcacaagcctttgatctcgtccagaatgttcttcaatgaactatctactgaatcatagattgtgtcggcttcggttgctattttacggagatacaccaccgtgtcaagcacattttctgtttttaatacgggtttatatcgaccagtgataccaatatgaatttcggtgaatttatcaaccaaatcctgcatatcttcgtaaaaactctcaaacgctttatgttgagaatacgatccggtcgcaaagtgtgcgctatgcatgtatgttacagacatcagacacataccgataaaggcatctactttgcttgagttatcacgatctgttacttcgttaaatgtttgcatctttcatcccttacgaacgatgaatagtagcaaattcgtttgccaccctatagcccaggtgtttacattctggttcagtgcggcattgtttttgctgccattttcgttccatatagttatagaacaattcactggtatttacactgggagggattgtgtcaagatagacctgtagcgctgcattgatgtaatagtcgaactctttcgggacgacagtatttcgatcagcatgtgatgcaggagacaagattaacaatccaaacatcatcgcttgtgatatgcgtttaatgttcataaacatttctctacgtacacacggatcaacaatagatccgttcctgtatatatttatagcaaaaaaggggcgaatcgccccttatgtaaaattagtctaaaaatacatcaagttatctcataccagcataagctacgctcaaaagcgcggatcttatttgcgttctcgatattttcatcccatccaatcacgccagctttcatccggcgtaactcctgacgcattttagcgcgtactttcgaatcaatctttttgactgcgatcgaaagcatcgcggagatatcaccatgagctttgttaccgtcacgattcaggtttttatcgaatcggatatatgcacaacctgatttgtgtttccagttggttgtgtaccaacgcaaaccatcagggctttctccgtgctgtgcataatactgtgaaaatgcttttgtctcttcgatttgttcgatagaggacttatcacggactggaacatatttcttacggtaagtacggctcatagtgttctcctttgtttgtctgaatacaccttaacagttcagaccaacattatcaagaagtttttcgtgataatgtttgcgacagagcgaaacgtatttgtcttcggctccgatctcaacctgcgccccttcggttacgaagttgccttgtgcgtcgatacgtgcaaccgtagttgctttacgcccacagtgacacattccccgcagttctcggatctcgtctgcccaggccagcaaccagtaagaaccctcgaacagattcaactggaaatcagtacgcagaccgtaagccattacagggatttcgagttcatcgacaacgcgacatagatcgaaaacgtttttcttcgaaaggaattgcgcctcgtcaacgaagatgcaagcaattttattccggcgctgaatgtcccagaacagatccatatcaggcgcaatcaattcacacttttcgttcagcccgatacgcgaactcactgtgtttgatgtgcgggtgtcgattgctggcttatagattacaacacgcataccgcgttctttgtaattgtgtgcgtccgtcaacagtcgcgcactctttccagcgttcattgatgcatagtgataatacagtttagccaattgtaaaccatccgttacccatgagttttttgttacgtcgcgcaagatgctctttgatttctggcatctggatcgcaatatcatactcttctttcgtcatagtatgatttgcgcaacccatacacccgcacacctgcgcgttacaccaacggagtgttccgtatgtcgcaatcaccttcattgctttagctttgattttgtcagtcatgattataaccgcccatttcgctatcttgtgctttatggatatcaagataccacatattgattttgcttttcagttcgcccatttctttatccagtccttcatcaacaagacaaagaatgtcaaccaccgttttacgctgtgtgatgttgattttgttcgctttcatggactgcgccagcgcttcacaggttttcaccagtgcggcgcgttgtcctttgattgcggcgatccgtttgttcgctttcttgatcgcccgacctgctttgataggatcaatcatgataaatccgccttacgtggatcaaccgatggatcgaagtgaacgacgatgaccggatagtctccagtacactcgtcaataatagcgctaatacgcaaccaatcgcccccagcaagccccgcaccgataagaggggtgatgataggcaatttttcaggaaacgccctggcgcgttctacagcgctcacaaagcatgaccggattgcatcgtaatccacttgtgggccagtaccccagaatttaaactgggtgtatgcgttgaagacaatctgaccttcttccgtcatgtagatggagttagtgcctaacttacgctgatcacctttcatcgtcagtgcatcaattttgaacgcgccagggattttgtgcttaacttctttagcaatacccgcgcccatgttgcaatagcagttacacccgtggatcaggtgtacttttcgtttcaggaacaactctacagcgttccctttgatttctttaataatcattttcatcacctgtatagtggcggtaagccagcacagccagccccgcgatcacaaccacaacacacattaaaatataacctgtgttcatttaaattcgtcgtcccatctttgccacgcttccaactcgtcgtcatattcagggaacgaggtttcatttggctttttaacgtaataccagataatgattgctgctgcaatcacacacccgtaaaagattactaatcccatcatcagtataatcctataccagcgttatattcttcaaccaggtaagtacgaagtttttcacaacgttccttatccggcgctttggtgcagaggttcatcattggttcagactgcaagaactcacgctgtttaaccaacttctgacgcttgaagaggtgcgcgttttcttcgccccacacataagccgcgtccagttgttcagcaatcacttgttcacatacggcaacgtctttaatgtcgcgatggttgcagagttcagccagtcgatcatcggcatgagcaaagccagcaaacagggtgagtaacagcgcaagttttttcatcgttttaccttagtatgaatcgtcttcgataggggtataatatcgactttcgcagatatacgcaagcactgatcgcaaactatcgctttcaaattcgggtttttgtttgcgtttcaggctccgacccgtgatacacatccagcgttcttccgcaacatcaaaggctaaccagtatgtgtcatgcagtgaacatgtatgttcgaagacatcaaacatcagtttaccgtcaatcggcttaacgtatggctttatgcgttgaagagatttcaggactgattcgaggttactgcgatcctcattcatcgcgatacgtaggatatgctgattgatttcagggttgtacccgtcgatcgcaagtcccatatcctggaagaacttagtcgcatcatggaaaatctctcgtccgctgttcggtgaattgatgtaaaactccatgcgtttcttcggagtcatcgcgcggacgcgggaagcggttttgtgatcgatctcttctttgatgtctttgcgagcatccagcagtttattcagtttttcctggtaaggtttcattaccgccctgatttctgcaatacgttcatcaacgatcgttaactgctgttccggtgtcagtttagtttccattacgcccccacacgcacaaagcgatcttcaattgcatcattaacacattcgtaaatgctaacgtcattagcgacgtgcttacgaatacctactttcacgatatccatgatctctttgttgctaccccatacgttcaggttgaagtaaacaccgccgctatgaattgtgttgttgccaacatcacgatatgtatcttgactttcacagataaaaagtctgcgtttttcttctccatatgcgaagtagatactgaacgattccatacgatgacgatcgaccgtgatggtttccactttaacctttggatctttgttcagttcatctaacacaccctgaatgatgtgcagcatgttcggcttgatgatagtcgggtgactggtaataactcgatgtgatgtgctcataatttaatcctcaatagttggtacacacataataaaaaagcccctgcgaaattgcaagggctttttatcagataatgcgtttttcttctaacagcttcgcggtatggttaaccatgcgagcataatcacgggcttctttctttgaatacttgaaccccgcgttgtaactcgccagcgcctttttcaagtcgcctttgtggtaatcaagccagtattccagttcgtgaagtgcgtacttggaaccaccccgaagggtttcgagcttattgattactacgcgtttggaatatgatttatccattcgtgcggacgcgctacgggctgttacttgaaaacaaccataagcatgatgattctttttgcctttccctacgttctcacatgcgcgagactcgatccaggcaatagccgctaaatgatatcccaaacgtttcgatgtttccgattcaactggctttgcagtttttcgatcgtattcgttaccgatcctgaaagcatactccaaaacctttttctgctttggtgtaatttcgtccaattccttaacatagctgggggcattggctggggctttcttcattactgttgcttgttgtagcggtaatgttgacttcacagaagggagtgtttggataaactctcctaacggatcagtcgccgcgttgccagaaaaagagcataagaaaatgctggcagcaaagataattttcttcattgtaatacctatttgtaacaagagagggctatgataccctcgtcttattatttatgcaacgattttacgctgttttgcttcggtcagttttttctcgatgaattcagcaatgttatagtttgaaatcgaagcgttcggatcgtacagagctacgatttcatcaaacgatacctgaaccacatgtttaaagtgaacactccagccagtcgtaaagatttcgctgttgtcgaacccgcaatcagggctgaacatggcgcgatatttgtatccgctgtaatctttcaaacgattcgggctgtgtgcgtcactggtgatcaggaatttcccctggtgagtctcaaccacgaagaaataacccagacgttctttgttgtccagcatcgtttcgaacttgcggttgttatcttcacggtcaacgcgagtttggatcttcttccagacctgttcatattcaggccaatcatgctcgacaacaaccccttttatgggttctttgccttgctctttacgatagcgatcaattttattcactaccgcagagagaagcagtttgtcgctatcacttaacgcggcatcaatatccgcatatttaagcactgcataacgttcttcgcgtttcatactactacatccttatcacagactggacaccgaatcacacgatacacatcacgaccgccagtgtaatcagtagataccttttctttgacatcctgcgcagtgtatgacaggacagcaccacaacgacaggtagtttgttttggggtaatactcacaacttgaaccataataacctcacaagaatagtttcacttcgctaccgcatttcgggcagacgatatgttttttcacgatgtaatctgctgcattgaagaaaccattataaaacgcttcggttctcttctgtacatcagacagttcatactctaacccacttttgcaattagcgcaaacggtaattagctttggactgataataacgttgatcatgtatacctcacgaaaaaagggggccgaagcccccttgattaaaagttctcttcgacgaatgcagccagtcgcccacgatatacggtatccaggatcacatgacttgaatgaccgtactctttaagtttttcaaccgcatacacaaagccgttgttaacagcagtattgcgcgggttgtcaatctgtttaatgttcccgcatagtatcagaagggtgttctcaccgcaacgggaaatgatggatttgatttcgtgattgctcaagttttgacattcatcaacaatcagaaccgaacctttacccggatcaggatgcccgattgagcgcccacggaagtaatacaggctagggaactggacaacgtttttctccagcagcccttctacgtatttgtcaacttccggttgatccttaaacagaatgttcaggctcgtaatacatggttccacagcaggacgcagtttttcgcccagagtaccaggtaagaacccgatttcgcccgacagaggactatccgatttaacatacatcaggtttgcaaagtgtccggcgttaaccaggtgcattgcaccagcaacagccagcattgttttacctgaaccagcagcgcccatgatggtcaccacatcggtatttttatccataattgcatcaatgaatgacgcttgcagtgcatcgcgaggctgaattgttttcatcagcttacgcttcatcgcggattcgtgtttgattggtaagagttcaagctgatactctccagcagccactacacgccctacaagttcaccatccgatagaatgtattggttcgggtaataatcgccgtcaggaagcgaggaatagcttatttgggctacttcgccaacatatcccaacacctcgacatcatcccagaatccagggatatcgacatacccagaatacaacacatcgctatctttcagcgagtcatcgcccgtgtattgttcaacaggacatcccttagacatcgcgatcaacagcatgttaatgtcgcgggtgatcagggttgcgttttcctgcatacaggtagcgataattcgcgcatcttgtttatcaagcgggaactcttctaaaccgatataatcaacgatacggagtttcacgctttccggcagtgctgggttcgtcaggttcaacgaaacccctgtttgggtaattgcttcgtacttctgccccaggattactttagacaggaggcggatcgccaatcgtgcttcatgagcggttcgctctttgcttttcaggtgatccagttcttccattgtcgcagaggtgataatgatttcagtacccgcctcaacgaatgagaagattgaatatgggttcgagattaaaacgttggtatctagaacatatttcatagaagttttcctgttaattgcggggtacgcggattcgcaccccgcgcactgcaattacatacccaaacggataatatggatatatgggaacggatgaagatgacttgaacgcatacacaaggtcagcgtttttgccagttcaaaccgttcgtcgatcgtcgtgtcacattcatcgaaaatcaggttgattgcctgatacttgatcgtttgtccacggaaaatggaagtcagatcttgacgtttcgacagaatgaaagacgaatcagcgcccttatccagtccatgttctaccgcagcacaaatacccatctgctttgtcggtgcaacatagatattcagtgtccctttagactgcttgatgatatcgaaagccgctttggttttacccgacatccgacccatatccagcgcagtttcgaagatagac

SEQ ID NO: 34 - DNA, 179010 bp, Unknown
  source: /note="Description of Unknown: KP2W-M0106 Bacteriophage sequence"
cgtgtaaatcttatcgtgacaacacacgatgaagacacatatcatgattttgaaataaacatgatccgaaaaatcaatcctgaatggaacaaacagcactatgacaaagctaaccaaaaatcagaaaaccctctttgaccagttgatgaaactgtgtaacgaaagcgaatgcttctacttcattgatcaaaaaactgtaatgcaaaccaatgttcgcatctttaactatcgcatggcgagctattccgactggttaaaaccaggtgcgctggaatgtcgcggtatcatgtttgcgatggatggggatacccccgtaaaactcgtcagtcgccctatggagaagtttttcaactatgccgaggtaaaggcatgggaagcactgaaagtctctcctgtgacgattggtgaaaccgtagtggatgtgatgattaaggaagatggttccctgatctccaccttctgtgattccggctatctgggcgttaagtctaaagcatccgttcaatctgaacaggctatggacgctatgagcgtgatccagactaaccgcgcattgttcgatcgcctgaccgaactggttaacgatggtttcacagtcaacatggaatacgtcgcaccgacaaaccgtattgtaattggctatcaggaaccagcagtggtgatcctgaacatccgtaataacgacacgggcgaatatgtcgattatcaggatatcttcgcagatggtgtattacgtccgttcctggttgagcgcgagaaaatcgaagtcaccgatctggatgcattcattaccgaagcctactcgaaagaaggtttcgagggttacgtaatcaaaactgataaaggttttgtgaaagcgaaaaccaactggtatgtaaacctccaccgcacgaaggatagcatcaacaataacaaagatctgttcttaaatattgttgaaaataccgtcgatgacctgaaacaaatgttcctcgatgatatgtacgcactcaagaaaattgacgcattcgaaacgttattccttgatagtctcaatcgtctgactgcaaaagcattccaggcaatcgaagacacgaaaggcaaatcacgcaaagactacgcgatcgcactgagtgctgacttaacccctgacggtcgtattatctttgggcctatgatgcgttatttcgatgataccgataagcaaaagctggttgataacatcgttgcattaatggcgaagaactacgaacagtttataccggaagaatataaatgacaaagtgctttggcgctggaagcacaacgttagaagaagagaaagcagggatcgattccctgcttctttacgttgacgttttcccagaaaccggaaaaattttttggaataacaatgcagcaaaacagaatcagggaaaagaagctggttctattatgagcaaatcaaaaccttacgtgagaattcggcacggcgatagaaaatatttcagacatcgcataattttctattactgtaatggttatctgcctttgcttattgatcataagcatgggttggaagctggggatggtatagaaaatctacaggaatcagatccgcttcataatatgctgaaaagaaaagctaaatcaacacctaaaacggttaaatccaaaggtgttgattacagggcttcgcgtggaaaatatcgagcacagataaagatagacgggaagcaaaaacacatcggttactatgataccgaggaacaagcatcaatagcttacgaggaagcgttatatgaatatcaaaaacgtattgggtacgtttaatataagttcgtggatatggcctgtaatagttgctggttcgttagcagggcttttgtacatgacaatcacgctgaaaagtgaaaatgaccaattggctaaagatatcaaagagttacaggctgatatcaaaaaagtcaaagagacaaacaacaccaatacggtgatctatgtcgaacaaaaaggtaaggatcagcagttggtcaaggatgccggacgtaaagatctgctgttcaagaaaccaggactgatcgaaatcaagatcaataagtccttcgaagagtatatggcggagtacgacaaatgaaaattgcaacgttagcccttgttctgggcgttctgttggttgggtgtgcggaaaagcccccagaaaagattttgcctacactccccgctaaggtgaatccggttaatgtgaaatggaaagtggttgcagaagtccgagagattgacggtaaaaaataccttgtcatgccttatgacggtaatccatatgttgccctttcatatcccgattcgttaatctttcgtagctggatgaatgacgttaagcgtcagaaagaccagacggataacattctgtgtaccgtgggataccctgagaaatgcaaaaaatcaaaataagaataaccgaagttgatttctttagtgacttaaccgttggaaaggtgtatgatgctacaaggatcaaagatcaactttggatctgtagtgattggtctattttcttagatttacacacttatgccaatcgagcactaattgaatatgagattgtgaaatgaatctgtttattactgtaggcgtaccaggtagcgggaaaactacatgggcgaaagaaaaagcacgtcaactgggaaacactttgactgtttcccgcgacgatatccgcaaaaccctttattgtgctggcggtgatctcactggctaccgcttcaccgaagagaaagaactgtttgtttgccgagtgcaagaagatacagttcgtaatgcactggcaagcgggaagaatgttatcgttcacaacacccatttgcaccaaaaagatcatgatggttggcgagagatcgcgaaagagttcaatgctgatttccatatcgaatggattgatgccgatatcgtagaactcctgaaacgcaaccataaacgcggtgtgaatgctctacctgtttcccgtgtctgggcgatgttcgaacagtaccgtaaactccgtggctgggttccggctatgagctatgcagatccaagcaaaccgaaatgtgttatcttcgacgttgacgggacattaaccaaagtcggacaacgtagcccgtatgactttacgaaggtgatcaacgatccgcctaaccctcctgttcaagaactgttcaggatgtataaggccgctggctatgcctgtgttgttgtgtctgggcgtgagggtactgtacagtgcgcacatgataccgctgcaagcctgattgggtatggtgttgacctgagcgatggtatctacatgcgcgaagaaggtgatcatcgtcacgatattcacgtaaaagagcaaatacttgttgaaaagattctcgataagtattatcctgttcttgcagtggacgacagggatacaccagtcgggatgtggcgaatgaacggtatcccatgtttccaggttgattacggcgacttctaaaaaacagttgacagtgagtgcgggtgtgataagatacccgcacaaacaaaggagaatattatggttattcgtgaaaatgaaaatgtgatggttgaactgggtaatcgtgttaaagttgagaatcctgttgaacttcaactgaaactcaaccagttaggccagcgcattgctgataaaattcctgctggttatacagtgaagattgtccgcgatggtcagttctccttccttctgggtattttgagtcaacgtaacatcgttgaacagcagttcgggattcagtggaatccggtaactaaattcgtaacatgggcgggagtattatgagcgacaaaatcagaaagattcatcaggcatggttctgtactgaaccaacgatgcttcgttatggttgtgtgtttgggttggttgataacgatcctcaacaggacattgcaacaagtccggttgttgaatacgcgattccggcgaacaaatcgtttgttgaagtggtgacacgttcaggtactacgtatcacatcgttaaccctgataacgatttcatcaaagacattctgaaatatatggatgatcgttaatgaaattcaaagtaatgaatatgctgagagcaatcgatcggagtcaacgttctcagtgtatttcgaatcgtgtaggtgctattatcgcgatgggtggtcgtgccgtcgcgtggggcgaaaataatacggtagaccttgattgtcgatgcaactcatgcaacaatcatatggtgaatgatgacggtaaactgaaagcggttgatcgtcctacacattcagcgtggtcaaacgataacgaaattcatgcagaaatgaaagcgttattgagtgcgcacacaagaggtgttatactcaaagacgcagcactttacacaactgcatcgccttgccctaactgcgcaaaacatatcgaatggtatgttgctaatggggcgattacatcggtgtattatctcgataaatacgatcgtggtaatgatgaatggatttcacgcttacggaaatatggctgtttcgtggaacaaattaaacgggaagagttagaatcgtttatcgacttttccaaagtagtgtttaacaacaatgagtaaagaaatgtctgaactgaaagtaaaagcatccggcgaatatgtgatcatcgaagctactgcgcgtccgcagggttccgaaatcaaatctgaatctggtatcgtggttggtgtacgccagcacggggaacaacctttttatggtaaagttgtttctgtaggcgtagacgttccagcagaagcggcagaacgaatcctgggtaaatatatcccactgccaagcgctcacatggcgaatgttcctgaccctgatctggttgcgggttacatttccgagaaagaagcaaaagagaaggaaacgaaatacgtttccgcacattacaaagcaatccaggcaatctacgagatctaaaaatggctaaatcaattcaagcaattatcgctgataccgtcagcaaatccaaaaagctgttcgacaaaggcgaaattctggaagccccagcgcgtattgacgtaatgacagcaatgatcattgatgcgcatcagggtaaacttaaatcccgtgccgatgaagtcatggcgtacatcgttcagttcgaagacgtatgtaagtacgcgaaagatgttgatccgctggttcgtggtatctatcgcagtcagttctaaaaattccggccctttagctcaataggttagagcgagcgactcataatcgcgtggttactggttcgagtccagtaggggccaccaaataagcaggtatagttcaattggtagaatatctggcttccatccagaatgttgagggttcgagtccctttacctgctccaattcgggtgcgtagcgcaatgccgttaaatggttcggaatatgcaacctttctcacggagaaggctctgttggtatccggtaataggttccccggaatgcggggtgaagtaaagaaacttccagcccactaaacaatgtgagatctatatgagaattcgtgaaaagacggtgtatgactctaagttaggcagaacaatccatacgttcaaagagattacgccagcgcaattcaaagagcggtacggcatgacattcaacgaatggaaagcggggttatgtaaaaatgactaccgatataaattaaaattccgtgaatgttatgttgatgacgatccttatgcagcagatgtatgtggtgaaattgcaccaattatcgagaattcgcccgacgcactaatacaatcttgcatagatgcagcatacgaaatttaaaagagaaaaatatgaaaggtcttcaaaagctgtttgaattaaccccgaaaattcgcgaaatcatcgcttcatcaaatgaacaggaaatcaacggtaaagtgatgaaactgtttaccgaggaaatcccagatttcgataacgaattccgtaaagcgttcgatgcgtattctgttgatggtttctttgcatcgccgcaggtgaatagcaagcgtgaacacagtcaccgtttattcgactggtcgatcgtgaatatcgttcgtcgaactgatattgaacctactaatcatcagttggtttctatggatgcttcggtattcttcatccagtatcttattactggtggatttaaagcagaaggtattccgttctgtaacgaagctctgtacgaagaattcgcagaagcgtataagtatatcaaagcagttcgttaatcaacaggctatcttcggatagccttttttctggagaagcacatgcgctttttaaaatacgcaagctggcttgtactggttccccttgatattctttctggtgttctggctattctgctggctcctttcgtggttccgttctacagtgaagaaaccggacacttacctaaagggttccgttggatggaaacattcgataacccgatcgatggtgatggtggacatatccggcgttgggctaacatccggtatcacttaggcgatctgggtgtgtatgcgcaacgtgtaggctggttgtggcgtaacaaagcgtacaacttcgcttatcacgtcttagggcgtgaagcacagtcagacttcgcctggaagggcaatccgaaaacagaaggtggttccgatccttcgcgtcacggttatctgttgatgtggaatgattcggcatgggggctttatgtcttcaagccgtggcttaaagtcggaaaggttcagttctgcttacgcgtgtattgcgggtggaaactgaaacaggaagtaactgaccctaacgggctggatcgtgtaatgctggcgttccatatcaacccgttgcgttattatgtcgtagaaaggtaatacaatgaaagcatatcagattttagaaggtttacacactggcacaatctacctggaagaaggtaatgatgttcgtgtggtggtatccaaaaccctcgaaatggattcagtgatcggtaaagctcgcgttgctccattcgcaaaacgtgaagtcgatattgaatttcaacccactgttaaagtggaaggtggacaacacttaaacgtaaacgtgttgcgccgcgaaactctggaagatgctgtgaagcatccagaaaaatacccgcagttaacgatccgtgtgtccggctatgcagtgcgtttcaattcactgactcctgaacaacagcgcgacgttatcgcccgaacctttacagagagtatataatggcgattgaagacgtacagggctataagccccactcgaaagaaaagatcgacaaagtaaaccgcatcaaggccgcagaagttgccctgggcgaaatcttcaaagaactggatgaagagtattcaagtgattacgcggtatcagataccgattcattcactaccgaagaactcgatgcgatgcttgaacgtatccatcaaatccaaaaggcgaaagaccgactgaaagaagcctctatgtgggcgtgtcgtgcggtgttccagcctgacgaaaagtattaaaaatcaagccgttgccgaaaggtagcggcttttttcgtttttatgcaaaataatgcttgcactgaatccgactttcttgtatctttaaccacgtaggcaagacaacttaactttgaggatgacattatgaaaacttacaacatgaaagaactggtttgcttcaacactcgtcgtgaagcccgtgcgtatgttctggctgctggtaaaaatacctctgctgtaatcgacctgggtactgataaagctgttggcgctcgttgggctgctgttgtagttatcgctgctcctgtgactcctgttaaaactctggttctgggtgcgcgtaaagccgaaactctgaaaaccagcacttgcaataacagaggtgttcataatgtcaccgtcatcaaaaaacgtagctttggtttgagggcttaacatgagtaccaaagaattagaacagaaagtaatggggttcatgagtaacagcgaagatcgctatgcaaaacacctcattgtcgaactgatcaccgcgttacgtcgccgcgacaaagagatcgaagaactcaaaaacgcatcggttcaggttgtctataaagatcgcgagcgtagtagctgggaaaaagaatgggatgcaaacccccaagaccgccaccttttcgggaaataagcatgagttccattaacatagaaaaagattttgtgatgtttgttggggtacagactgtaaagaaagatatcttcggtaaactgtacctgtcgaacgacgatcgcaaccccgcatcattcgaaaccgaagatgatgcatatatcgcgaagaacaccagcgataacgaagacattcgccagtatgcgcggatctataaccgtgaagtaacaacccgtctggagagagcgtgatgcgtgaaggtattgaagtaagaacgtttcagttcgaaatgcgtcgtatcccagaagcatcaatgaatctcattcgagaacacaacgtgaaaatcgtagaaattgatgcatacgcgggtactgatctttataatgatgcgaagattgacagcattgatttagaccttgagggtgatattggggatctgaataagctggctattgcattgaatgcagaaaccaacaaatacgggtatacaatcaaatgaaatatattctcgaatatcatgagcatcaaattaccgaagcaatgatcgataagatgcgggtatataaccaaaacattaccagcatcaaaccgctatcagtgtgccgtgaatttgggggatactccttcgcgatgtacacaaattccgaagacgacgcaaccgcgtatctgaaaagtatcggtgcaatattcgacaaattcgaaaaagtatggaaggtaggtttctaatgaaaaagtattttattgaagcggcagatcgtatcgttctggctctgctgaactggaaccgtcgccaggatgtttctatcaaggcatcaaccaacgggacaacatatgaccgttatgatccggcgcgtggactccataagccttacgaggttaaagcgtgaagtattacggattcaaaacgagtcattacggtaaagcataccgcactgacaacatcgatcgcaaacgtccgtactatgattctctggtacgtgctggacgcaaacgcgctcgccaggaagggaagaaggaagcagaaaatgaactttgatcaacccattgcaatgataatcggtgctgtcctgggaatgcttcttttgtttggcggaatcccattaactgcatatatcatgaggttattctaaaatggacatcggaagcggttcacaatatccatcatgcgcattgagcaacttcgccccgcatccgttcacgtttgacggggtagaatgcgcatcaatggagggctttttacaaagtctgaaattcagcaatccagatatgcaagcgcatgtgtgtacgctggttggtaaagccgccaagttcaaaggcaagaaaaagaaatggtatcgcgatcagaccctatactggaagggtatgccgattcaccgtgaatcagaagcgtatcaaatcctgattgaaaacgcgtacaatgctcttttcctgaatgacgggttccgccgtgcgctggctgcaaccggaaaaagtaccttgactcattcaatgggaaagaataagatgaatgaaacggtactcactgaacgtgagtttgtacgcaacttaaccagattaagggatctgttatgataggttataaagattatgatgaaagagtagaatgcgcgttcctgttcaaaggcgcgattaacccgctggcattactccacgcacagggcgctttgagttctaccctgattatgggtgttatctacaaagcgggtgtgtattacgttaccatcggagcgaacaacattaacgtgatcaacagctacgttgaaaaatgtaagctgaaagatattgtgttcgataaagtcgaaatggatgttccgggcttcgacgctgtttatatgtacaagggttgataatgagttacgtaatttatttcgactgttcggatctcgatcctttcgttctgcaacaggcaaagaaatatcatcaagatatcactggtatcagtgtcacgaacgatgatatgctgtgcatcgaatttgattattatcgtacatttgagcgtgacaaattccttgcggatattgaagcgtttaaaagtacccttttctttgatcgttatgaggttaaatcttgaaaccagttattcttaccgacattgacgggatcgccgtgaagtggcaaagcggcctcccgttctttttgtcaaaacacaatatgccgaccgatattgccctggatatggttacagatgaaaaattccgtgatatgaccgaaatcttcgggtgtgatcaccaactggcgaaaattctcatggaagaatacaacaacagttcgtttattcgctatctaagcgcgtatgacgatgcgttgattgtgatcaaccgtctgaaagccaaatatgatttcgtggctgtcacggcgctgggaaccactcctacagcaagccttaaccgtattgcaaacctgaacacgctgttcccttccgcattcaaagaagtgatggttgttgggcatggtgaaaccaaagtacaccgctacctggaagcgaaagccaaatatggtaatcgtctggtttgcttcgttgatgatcttgcagtaaacttaaacgaatgtcataacgtcatcagccagttgccgttattccatatgttgcgtggtgaacgtgaaaccccgtggtcgcctcaccagtcagttaaatcatggtttgaaatcgaagagaaattacatgatcttacagattctaaatgaactcgcttcgactctgaaaatttcagagaaggaagcgatcctgaaacgtaatgcaggtaatgatctgctgaaagagattttccgcattacgtacacgaaacagattatgtttcacattaagaagtttccgcaggtggacggtaagccaggcacaaccccgctatcgaatgctatcgcggatttgatgtctgatttggcaacgcgaaaatatacgggcaacgcagcccgtgatcgtctgctggatatcgtatcatcggtgaacgagaatgatcgcgaagtgcttcgccgtatcattaaccgcgatctggaatgtggtgctggtacaacgttaccgaaccgcgtatggaagaaactcattccagaacagcctcaatgcctcgctacgccgtttagtgagaaagccttaaaacgtattcgcttccctgcttactcgcagcttaaagccgatggtgcgcgttgtatgtccgatctgttagagaatcagatccgcaaagcaacccgcgcgggaaatgagtatgaaggtttggtgaatctggacaaggatctgaaaaagattcgtgaatatctgggttatgatgttgtacttgatggagaactgatttatgtccctgctgaaaaaactgctgtcgttccttcaaacagcgttccatttagtcttgctgggtttatgggcgatgacgacgattctgtttctgaccttgtggcagatgttaggcgggaagctaccgagaacgagacacaagcggaagcgaaacgcgaagagggcaacgggattgtaaacaaatccctgaaaggtactatcagcgacgaagaacagcgcaatatcgtttatgttgtctgggatatcgtaccgtatgaagtatactatggcgatgctccgagtgttcaaccatattgcgatcgtttctctatcctggaaggtgcgctggctggctctggtgtaacatcggttaagttgatcccttctatcctggtgcagaactacgcggaagcgaaaaaggattacaacaattaccgcaatgacggtaaagagggttcaatcctgaaaaacgttgatttcaaatggaaggattcacgcgttgcggatcaggtgaagttgaagaacaaaaccccgattgaactgcgaatcatcgacgtgtacgaacacaccaaagaagctcataaggtcggagggttcgtggttgaggacttatcaggagaagccagaacaaacacaggttccggtctgactgatacggactaccgatacgatgaagacggtattaaccgcgtgtacatcccgttagaagaacgtggtgaactggatcgcgaatacatcatggcgaacaaagatgactatatcggcgctatcgtcgaaatggaagttgacggactccagaagtctaaaacgcgtaagaagggcgaacctgagttcagtttcttcttgccaatcatcaagaagatccgacgcgataagaccgaaccggatgatattcacgttatcttcgctgatctgttttaaatagcactttttgctaaaaagccccttgcatgagtaaggggcttttgttatattacaaacatcgaaacgaaacagacaaaaggaacatcccatgcaaatcactaaagaactcgaaggcaaagtaatcgttctggtaaatgaagaccgtttggcacaactgggtaacggtggtgaaaaactgccagcagacgcactcgaaagcctttctaaaatgcgcgtgatgcgtgttactgacggttgggttacttgtctgcctctgaacgacgaagacaaagccgtatacgatgcacaagcggattcatgggatatcgaagtacctctggtaaacatcgaagttgaagagtgctacgaaatcgaaaaataatgcttgcttactgggtaatgtagtggtacattacccatatcgaaacgaaaggagaaacatcatgaaaattatgcacactgcaaatcaacttcaaaacggcaactacgctatccacgatgctatcggtgcgctggttggggtttatcttcatggtatcaaactccttgaagtaagtgggaataccttttatggtgttgaaaacatcgaagcagcgatggaaattatcggtgacctgaaatgagtaagaaactcgaaatattcgaaactatcagcgaagaccctaatcatcgctggtgctgtgcgaaaactggttttgatgctgcatggggtgatactccagaacaggcgcgtaaaaactgggaacaccaacaattgttttttgcctgtcgggttcctaccaattatgaggggagtcaattgttagcatgaaaaataaagaatatgacccaatagaagttaaagagcggttatcggtagcaagaagattccttgaatctatcgaccctgataaacttggaaaatgccctgatacgatttgccttaattgtgggcgatccgtaatggttggaaagtgctgtgataatcagaatatcgttatcatggacaggaaagaagtttcaccggaagtgtgggatcggattcaagagatcatcaaaaacccacctgaaccgacgaaacgtttacgcgaacttatgagcaggaaaccacgttatgaaaaatgaaccaagtaaaactatccgcctgatccgttgggaagggcaagaaatccgttatgaagacgacgaccgcgaattcgtccatgaaatgcttgcgcataatctgggattcaaaaacgccgcactggtgatgatgcaacaaaccagcgatgaagacacctggcaatgcgtcattctcgatctggacaaaaacaaggaatacaccgaagatgaactgtttgcgctcacagagaacgctacagcgcgtcagaagtgcttcatgatcgatatgcctcgcgagaactacgagaatatcaagaaagcccgtaaacagaacaagaacaacgtgttcgacctgttcatgggctatcatgaagaaactacggcctaagcctcacttgttttgctggtgtcgttagtagccgctgccacctgtacacattccaatgtttgcaggtggaaatcttttgatacgtcgcggacacattcaacgatcagatacttccctgaatattcatcccctaacacctcaatcaatgcccccactttaacatccattcgaccctgattgatatcaaaccgaatacgtttttcatagctggataacgtctgacacttcacagcctggaacggttgaccctgtttgtctgggttctggaagttgttctcatataccgcgtttctgttcatggtgatccatgcgttttcaatatcggtactcgcaaggatatcactatacagttttttatccgtcatcgagaaactaaagaaacttgcatcccctaacagggtagtgttatccttatgggtaatgtattcacctttcgtgaataccaaagcgtcacctaaaaacgggttacttacgttgaacttgtaagcctttaacggggtttgtgcgaggatctccgtattgcttttcataaagataccggaaccatcttcccacagataacagaagtcagacgaatctacgctctgcccgttgtcacggatgtaatcaaacacggtttcatacgtcccgctcaggcaagccggaggaatacgcacgtttgatgcgtcgatatgcggcgtgatcaacttcatatcgttatacagtgccgtcatgcactctgtaatcgtctgtacggcgttgttactgaacgaacgggaaaacttacgacgaaacaccgtatgcaccggagaaaggtttaggcgcagtatagagcggttcatatcatcggtttcgacgtttgaatacagaacaccgtagtaatgctgttctaacgtttcgttatactggaaggatacctgaataatcggtttttctgtcaactgatagattaactggttatcatagatctgcatcaatgtttcagaagtaccgttaatgatggttttctcactcattgagacaagggcaggtaacaattcaagatagacgttatcagcgaacttttcatatgttggatataatttaaccgacacgacgcggtttataactttactggacattagacatcctccctttatattctatttactaaatagtaaatatcgggatacttgaggcgatcatgaaagagaagaaaaacacacttgataaatttatggttacgcgtttaaacatcaagaacagcaaaaataaagtagtcacgttgcctactggtgaacaggttacgatcccccgtctgggctatcgtcatttcacccagattaaagcaatgaaagacccaatgcagttgcttgagtatatcatcaaagagattcaaccgcgcgaattaaccgcagcagaaaccgaattccttttgattcacctgcattatcacaatgacgataaagcaatggcgatactgaaagagatcggtattaatctggatgatatgaaaatcagcgaagctaagtatgaacatacttttgataaccttcgattggtcttcaataaaccgaccctaatgctggatgatctggcattactgcttaaagaagcgtatgacaacgggaagccgatcgaactgacggacgaaaaccgtattcaattaattaactgcctgtatcgttatgaatatgacgatgtaaaacgtggcgtactccaggaagtctatattgtgcatgaggggaaaaccattaaagggcttaacatcatcggtgaatgataatggctagcaatccatattttaacgaagaacaacgtcgccggatgcagaatccaccaaaaccacaggcgcaaccgactgttcgtaagatccaggcaacgttagataaagattcgatgcgcgagttaaaggatatcaatgataatacccttgaaaccgcgctgaatacactggacatcaaagacagtgtgaaatcctttgaggatcgtttcaaagagaaattcgctggcttccaggaacaatacgaacaggatcagcaaccacttgctgaacagttgcccgattttgttgggccagcgcgtccaccatcattaacagacaacagcacaaccagtgttgataactccgtcagtgtatcgaaccagcataacccatttgcgaaaatcgaaacatacaccggaacgattgcagaagcaatcaccaagtttatcgaactcgctgaaaagaaaccagcccccgcgccggaacctgaaccagtaccggaagaggaaccggaggtcgatcgggacaagaagaagatccgcgataaggataaagacgagaagaaattcagcaagaaagtattgtctttgctgggtgcaatcaaggataatacatccggtcttctggctcgctttatcggttattctctcgaagcgctggcgaagtttgcaaaatggactctgattatcggtagtatcgtatttgcgatcgacgtactgagtaaggttgttcagaagtggttccaggatattcttgcagagggtgaagcctcgaaagatttgtttggttcatacttcgggaatatcaaaacccttgctgagaaaatcaacgaaggtctgcaaaacttcgatatgagtaatttgggcgaatcgctgaaaaacttgttccttgaaccgtttaaggttctgggcgataccatcaaaaccgcaatcacggaaggtatcggtaatctgatttacgctctgggtgaatataccggatctgaaacaattaccaacgccggacgcggaatgaaagtatcagcactgcgcgacaaacaaaaatacggtcttgaaattgatcccgatgacctgattctgctgaaacagcaggagatccaggatcagaatgataaagtggttgaggcacgttctaaggttgtcgaacaggttaaggctacccagggcgcattctcatatagtttcggacagcaaacagacgcacagaaagcattgtctaagcaattggaacagatgcgcgatcgtgtggctattgaagaaaagatcaccgaagagaagaagaaagaactgaaagcattgcaggaaaaccccaaactgttacaggctgaggttgataaagagaatgccgctaaccgtaagcgcgtgaacgaaaccaaacagaccgaaaccgagcaagcgaaagcgaaacctaaagcggatagtgaatttgatcagggcgatgaaattctgaacaaagacaatctgacgggcaacgataaaaaggtaatggaaaaactcatagaatcgcttgaagagaaaaacaattcgaacaagctgaatgaggacgacaaagaccgctatcgtgatatgatctcccgctggcaggaaaagatcaccgcagtaccggaaacgagtgcaagtattgacaagcaaccggaagcagtgaaagcccctgttcagcctacaacgcctaacagtgttcaggtcaataacaaaacagtaaacaacacggttcagcattcagtacaacgaactgaccgtaaaccattgattgcattagcttaaaggaaatttaaatgaaaattacagtattgcaagacactgtacaatcatttgctgaaatcaaaaatgctggcatcccctctgggggtgctgcaacaactaaaaacgcgttgactcaaccgatcgtaacagcggaatttccttcccaacgtgcagcaggtattgataacgcttataatgcatcaagcctgtataataacggcttgctgttcacagcatatgatttcacgggtggacttgcaccaggcagtaaagacaactaccgctcattacgtcaggcagcacagaacgcgcaacagatccttagtgctaacactgggaacgttcgatacaaacaggttttgaatacccgtactatgggtacacttaaccccatttgtcaaatacttttaccgcgaagcctgaacgataacgaagtgaactcacaccgttatcaggatgcaaccgatagtattgttgctaaaggtttatcccgtgcggtatcaaacgttatctggggcgctgtagaatccgtttctggtggtattctggcagaccgtagggaagcaatcgacatcggtacgaaagcagcgtttcaaggctctgataagcgcacaaagatgtattacaatacattcgttatcgaaagccgttatgacctgctggaactgattaaaatctattacctgttcacggtgctgggttatggtactacttctggcggtactccagcagaattagccggactggttaaacaagcgtataattccagcgcttcgaaggttgcaaacgtttttgcaccatcaacaaaccagacgacagcaagcgatttcaacggcagcatcggggatcagattgttgacttcgtatctaacgttgaagttattaaatcgcctcctgtgtggtttattcgtgacttccagacaggagacagtttgcggttccctcattccacgttcgggccagcaggtattaccagcgttcgtttcgggcgtacaatggacaacattgtaaatacgttgagagaatcaccgaacaccccgatcgcagttgaaatcgaaattcagtttatggaactgatcgatatgcgtcaggattcgatttttgatacgcagtattaagggggaacaatgttctatagcgtagatgaatttttgtcaggaatggcaaatagagactttcagcgaagcaacctgtttagtgttgtattcgcaaccagtccagcatcacgcattctcgacagcacgatcgggagtatccgcgatactttaatagatggtactatgagttccattaacgcgaataacccgaacgagttcatgaacgctattacagggggcgtaagcaagctattcagctatacagttgataaagctattatgtccctgaacaaaacaggtttcagtaaaatcatgggggcgttaagccctcgtttaattacttccctgtttggtgatagtgtttacggacagatgctaacagaattccgtgacaaaatgatgtataatatggggttgagcatcgttggtgttcagttgcctggtaaaacactgggttatgaatacgtgtataatggcggtgtaccccagatccgattcacccgaccggagaatggagaattatcactaacgttccgtgtggattcagaagcgcgtaacctgaaagtattcaacgaatggttatcagctattcgtgatgatgtatcaggccagttcgcattcattgatgaagtatcaagcgcgatccaggtaaacttacacaatcgcgatggtgtcccgcacagcacgtatgtattccagaagtgtttgcctgttaaagtcagcaatccagaactgagttatgaaagcaataacgaaatctggacattcactgttgactttgcctataaaacaggctggcttgttgaagcagataaagaaggttgggacggattcaaacaatcacttatcgaaggggcagcaattgccgttcgtggtgtggttactggacaataaggggcgaaagccccttttgaggttaaaatgattgacataatccgcgtaaaactccctggtggagtgaagcgattccctatgtttaccgtgcgcgatcaattgagtttcttgctcaccagcgcggacatggaagggaagacgctcacagaacagcaagaaatgctggatgaaattttagatattctgtatccgggttattcccgcaccgaacaggaaaacatattcactaaggtgtattgcgtatcgttcggtaagaacgcaataaagatccgaatcaaaggaagcagcggacaatcagaagcattcatgcatgtaactgattacgttttgcaaaatgaatatgcccttgatgactcgcttactctgggattcaaattcccgaaacatcgtaacaacagtgaacaattattccttgaatgtatccagtatgtcaagcaggacggcgaaagatacgaatggaatgcattagacgaggatacaaagaacgcgatcctggatctggtgtctattgaagatatggaaaatatcgttaaactgttacgcaagtcctgtcatgttaccgtgcgtgatattgagttcagcgacttattgacactgtacaaaatcctgttcaacaaatcagaactgaatgagttcttcaaaaccaactatttgttaaataagaataccgtacagattgaacctataatgaatggaagcccgatggaacgttcaatttacgttgcattgctggcggaagacttgaaacgaaaagagaatgcaaatgcgtaaacatacaccccgacatatcccaaaatataatgtgacttatcgcccgttaaccattggcgatcttgatgacacggataacttcattattgaaggtgatgtgttcaagcatcagcgcgattatgtttacattatggctctgttcgacagtatcaacaaagagactgtagatctccaaatcaaatgccctgattgcggggaactgattaagtttgtgctcaatcgtcatcatatcatggtggacgaatacgaagaaaagctgtacggcaatgagatcaagatttcagtcgaaccacaccgcaccggaaaggaagagttaccagaactgattaagtttgtagtcatcgacggtgaacaaatcttatgggatgactgtaaagagtcagagaaagaagccgttctggatagtatcgactatccggtctttaaatcaataaatagcgctctggataagccagcaatcgttgcaaacattccggtaaggtgttcgtgtggctacgagcatatcgttgcactgagaggcttagaggcgtttctaaaggtggttggataaaatgggtgttaaccttcgcttactgtatagcgatatcgatcccaacttaacaaaagactggaacaatgacgtaaccgcctcgaaaggggcggcagcggtaaagaatagtctgatcggtatcgtaacaacacaaaaaggcacacggcctttcgatagcaactttggttgtgagatcggggaacagattttcgagaacatgaacccgctaacagcggaagcagtaaggacttcgattgtctccgcgatccgcgcatacgaaccccgtgtttacaatctggatgttgaagtgattccgcagtatgacgaaaacgcaatcaccgtgacgatttactacagcatcattgatgaaccggaagaagtagaaagaatcaaactccagctatcatcctcataacaaaaaagccccgaaaggggcttttcttattccatcacgatccagcccattagctgttgatatcgcaattcgaacggggtgatgaaagagcggttattgataaccttcgtcccgttataggacttaatcacttcctcaccacgaagcacatattcgtatacttcgtccatcgtatcataacgaacttcttcgacttcgaagcagaagttggaatattcaatcattccgatcttgttcgcgtaacggcgttcgatgcatccctgtttttcaatctgagtgatcgcagtatcaatgaactgcgcaagtgcttgcatgaaattaccacattcgacttcacgacccccgcttgagatagccaggtaaacgcggctcaatccatcattgccgatgtaaccgatacagtcaccgccaatatagacagaccagactttacccatcggccccatacccatacgattctcactacgagaaacacctttcagtaacagtgccatgatacctccgcgaacgtaattcattttcatgataagccccttattttttcaggttgattaaccaagatggttgggtttctaaactaaccgctttccaagcatatgcaacactataaccggaatacgtctgacatacaacagcattttcatttaaatatttcactttgtgatctgcctcttgttcatccagggcagcacacacgatattcttttcatacactccgccgtttggctggataatggtttcttcaatcagataaacgctgttcatgctaattccttctcgattgcttcgatgatgtggagaacgtaaccgttcagttcttttgctttatcagcggcttcaaccataccgtaacgaggaacttctaaaacgttcgcaccttcgagcaggttgctttcgatgtctacgattacgtagctctcaccgattgtcgcgccttttctccagtcttttacgaacttcatcattttagctttcatgttctcgttccttttggctgttccgtttcgatatgtgtaatataacaaagccctcacgcgaacgcaagggctttttgggttaactgaatttattatagagagtgaaattaatccctatagaattcaatgctttacatgttgcatcaagatctgttggttcgatttcgatgatgtatttcaacgctgtgtttactggaatggtttctggttcttcgaaagatgccagggttggcgctttcaccgtttctggttcagcaagcgcggttttctttacgtcaaacgcttctttgaacttgttgaccctttttagcagatcatcaatcaattcgatgttggctccgtcgaattgtttggtttgttccagcatactcgtaatctttccgtatgtagtgcgtctggtttgttccgtgtaattccctacttcataacggtcgatccggtcgatgattgcccgaatatgtccaagattcgcgcgatcgaaatacgcaatcaacttagattttctgaacacgaacatatatggagcattaccgacaatgtaatgagttgccgttagaccaaaactaggatcgatcagaattttaaccgtgttgaaatacgggattaaatttatttcacgttcaggtaaacggaaaacttcatctttaaagttcttcccaatccggtcgatctcttccagagttttacccatcatcgacgaaattatttcaatttttttagatacataagccatttttcaattctcatttaattaatgcataaaagatttgacgtacttcacgatttcttcacgacacatatcgaccggagtatcctcagcaatagcagcatgacagaagatttcaccatccagccagaacgatagcatgtactgaatatcccgaccttcgttttctttctggtgtttcttgatgcgatcaaatgcatcatccatactttcggtagctgtaagcatttcagattcacccgctacagcagccatttccccagcttcatcactgaattcgctttccagttcttcccagtatactatcgttatcatggattaccccaaacagattttacatttacagagaggacattccgcctctttaacgcgcaagcgctttgttgctgttcgcttcgctgtgttgtgatcatacacatgcaaacagcggtaacagatcaccaatcgtttagccgtcataaccaccaccgcaacgaacatcaccttcaatgaacagttcgcggttatctctcaggagattgtatttcttttcgagttccggcccgaatgcgtccgcgtcgtcataccagtcatagtcataacttccggtttcatcgtcgtattccggttcgtcgccgcgctcattgaagtgaacgattttaacatcatccagattcagttctttcaacttgtcccagatgcgggttatttctacgctattacatccgaacgcttccagtgtgattgtaccgtcatcgtgtatttgaggtaaaccccagcgaggacgagtatcatcaaacatatccatcagagattcaacgtttgactcaccgtaaatctttgcaacttcctgttctttaccagggcggacaagtcctatcccgataatgaaactactgcttgagctattgctcacgaacccagaacggatcttcatcgccttgcctcgtatttcgcgttatctgcgattttctcatgatacaggttgtatgacaacaccagcgggatacaagctactataagcccgatgatagccagttgatattcgcgtttatcgaacgccatgaatgtaatcgtagcgcccagaataaacacacctaacgcaatgatgaagaataatgtcattttggcagggtatccatttcacgagattttgctttcaggatgtcaatcacagtagtcatcgcctgttctacatcaccatcatagtgaatcaggaatgttttgtgaagtcccatgatcagacgattgatgatataagccatttctgacggtaacagtttaccattctgtcgattgtacttctcaaacaagcggtagagttctgcgctattgcctggcttctcgatgctaaaattatgcatcccagacagaataccatccagatacagaacagttttgttatcactgcgcaggtgtccgccaaccttgtagtagttgctgaatacatacggcttttcgcggatatcttcgatatcgaaatcaccatgatcttcgatgttgccaacatgggcgaagaaatgatgatcttccagttcgagaaggattgcaccctttttgtaagggaatccgactaaatcaatctgccagccattttcaccgacaaatacatcatcaacaaccacgaaatccggcagcataggcgcgtatgcgtggttcttttcgttgttttcacgataggcttgtggttcggacaggtacaggatatcgccttttacaacttcaccccagaatacgttacgtgacatattattttcctcaatatgccccctttcgggggcggtcattgttagattttgacttctttttcttccaggacgatttcacattcgaatgatgtggtttcccagactttccagaaatcggatggaatattatcttctttcggaagaatatcttttgcagcgatagaaactttggtttcttcgaagtccagatccgcgaaccatgcatgggctactacaacaccgtacattacgcgacttaaacgggcattcagtttacggacttcctgaatcgttgcctttgtctgcttatcaagatactcgactacctgatctttgtcaagcgcatccagttcagatttcacctgatcgtaagcccacaggataatcaggtcgccgttgttcagtttcttcttaccttcttcacgcttcgcgacggtagccgctacagcaggaagggaggaaacacccttgattttcacgttcagttctttcgacatgtaaacatcagtcgattctgtgcgctcaaccttcggagagaacccgtaatcacgaataccctgttcagacagccattcacccgcagcctcaccaaagcgctgtttcagcccttctgcgttgcgcagtccgatcgcgttgtcacggaagaacttcataaccttctgacgacctttcaggatttctaggcgcacgttatcagtcacgaactctttaccgcttaacccgcgagtcatgccacggttaaccagaggcagagaggtaaagtctaccagaaccgacatacgatcatcaccgattttttcgagcggcttgatagtcaggccagaagcacgaaggtttttcagtgtcggaatatcggtttccagcggcagaactttaacgttcacgataccatctttaacgatggtgaagttacgcacctgcttagtttcgactttttccggcagaccgaattctttctgtttgctttctgggatagtcacatacccttccagatccgtgttgatggaaatgttaggacgggaactgttacccaccagatgtttaaccgatactttggttgtagtctgggtgaacttcggaacccatacttcatgcgctaccatttgcgccgccagtgctttacgttcttctggggttgcagcgtttgcgatctgttcagacagttgatccagtgtatcatcttctttctgtacagtctgacggcctgtgcggttgtacgcccagtgttcagaagacaggtcgatcactgtgtcagtttgtgccagcagttcgagcgcatcaaccagagtgaacgcgttttcgtctggaaccatgctgtaatcaataccatcaacgaaacgctgtgacggatcaacaaccgcttgtgcaatcaggtctttcgcgttggaatagtcctgcttagtaaagcagttgtcatacgccttgatcagacggacatcacccagcttttgaagcactttccatgccagatcagggttcattgtgtgtagtgcatgataaagcacgacatacagaacttgctgttcgctggcgatgttcggatcgaagccgtcaacatcattgatcgcgttgtcacccagcgcccagatgtttttgatgtgttctggaaccagtacaacaccgtttgcagcgttcaggacatacacgcgcccttcgtccaggtagatcgcatgggtagcatcagcaacgttgacttcgatacgcgcggaagtctgcgcggtgataatttcgttaaatgctggttcgtatgcgtcgaaaccttcaacgaatttgtgcaatgcgttggttgcttctgccattttttccagcagaggacggtttacataataaccgtattccaggaacgcgatactgttgaaagtcagtggcagaaccgcacacgctttcagaatatcatcggtacgccagcagttatcataaccgtctgtcaggaagatcaggctgttcaggttgccgttttcagattgcagatcggtagcgatttccgcagccagattcaacggctcaacaaagccagtacaacccgtaggtttcaggtaacggtcgatagccgcgcagatgttagacaggtcagagacattgctaaccttctcaccacggaacaccgtaccgtaatcgcctttgctggagaagtacaggatcgaaacggtgtcatcctgtttaaccagactcgccaggtttgctttcaggtgtttacggatcttaggcagttcgttgtacattgaaccggatacgtcacacacgaaaacatggtttgtcggggttggcttcgatacagcgtttttgaattcgatatttgtgattgacatttaaattttctcgtatttgaatttttctaaaatttcgttaactttattgcttactgcttcgactgtacgatcacacccgaacttatgcgccaggagttcaacgtattcatccatcgttgtgagtttggattctgcaacgtcaaacgcaagcgcatacattaccggattccatactcgaacgatttggagagtatactcgttcagttcaaaacgttcaagatattttcgcaaagaaaatacatcaaacggtgcgggacgatcctggctaaaggggatcgactcccctaacgcatagcgaggcataacaacgcaaacttctgtttttagcttatccatcagtgatgactctttgatgtgtgttcaaggttacggaagatgtttccatgttccagttgagttccgatcgggccgcattcatcggagtacgtgaattcatagataaacacgccgtcctgattaccgaacttcgtgttgtactcttcgtacaaccacattttgatcagagcgtctttctcttctgtgtccagatcgtaccagtctcgcccgtcatacgcaagcgcgatttgagggtttgaacggtagcgggtttctgcgctttcttcggtttcccagtcatagcgcttatcgtcgtagaacgattcaaagctattacccagatgaccgcctaagtcacgatgaacgtgattgaccacttcttccgctgtcaacggcggatcgtagtaaccacaatcagggacgcaatcgcccatcatttcgcgcaggttgtcgatattagtcggatctttcgggaaccggacgatgaaactacttgatgaactgttgctcacaaaaccagaacggattttcattttacatcctcaaattgtaagttttctttggttgcgttcgcaatggctttttcgttgctcagtgttactatgcgcagacgttcgccagtaaagccgtcgcattcagtgatactcacccagtcaaaaggtttagccatttcaatcgcacgttccagcgatacggtagaaccgaccaaatcactaaatgtatagtaatcttcgcttaaactttcaacagtataaattttcatgatactttaccctttgtttcggatttcaggacgatgttactgtaaggatcttttgctaccagttcccacaggtcgccaggatgttccccgctacggtagacggatgaacggatgatttcgttaaacttgctcagggcttcgtctatgtcgtcatacccgcatttgagaggcttacggttgcaacgaatgaagaacatttcgttggtattctcccagcgttcggcgtttttaaccttcataccgcctccattttaccaatgacttcttcgtatgtcacagggttaggttcatagccgttagcgcctattgtatcgcctactctgtttcctactaaagaagcaaccgcaactttcttaccgtctttccacgcagtgaaatgcagattatccgcaacatacgggaaggtttcgtgattgttcaccgcgtcgatgcagtccataacggtatcagacgcgcagatcagattaccaggttcataatcaaccaaacattcaacagtgtaaatcataataatttcctcacgaaaaagcccctttcggggcttgattaatcagtgtccgaacacaccacgaatagactctgcgaacgcgtacagttcagggtttttcgctttcactgtttcgatttgttccaggatgtaatctggtttgtatttcgcaccgaaccagcagtaagagaaagaacgatcccacatgaacacgttgtagtattcaccgttacgcacttcaaccatcacgtaacctggattagaacccagcgggtaatctttcagtagattaaatttcgcaccagcgccagtacatccgttaaacaggtcattaaaagtcatggtatgttccttttcagtttcgtttcgttaaagctaatgtatcactatcctggtcagtatgcaatgtttaattttgcaaatttaccaaaatgttttatcgcttcccgatcgtatgcttttgcagcctcgtattcgtcacgataggaaccgatatgtttaaccttaccatcaaccattatctgcgcgatgtaacgtattccggttggttgattgcgcacacatacacccttgaatcgactggttccttcctttcgtcgtttcctgttctgggagttacgggattgatccgcttcacgcaagttatcaatcccgtcgccagcctcaacaccatttttatgatcaatcacatcaggcagttttccggttgcaacgtagtagatgattcgatgacgtagatatcctttgcttttgaaataaacgcgggtatatcctcctttaatcttcgaacctacttcctttccgatcaagtcagaacgtttgtgtgacgttcgtataattgtccccgtttgtatatcaacagaaacagttttaaggaattcgtcaattcctttctgttcttcttcgattgttcttagtccgttgtgtgacataacaccttcttgatttgttttgctatagcctcgatgactggtattgaaacagaattacctgcttgtttatacgcttgcatcttgcttttgttgataataaacgaatctgggaaaccctgcaaacgaaaacactcacggggagtaagtcttcgggggttctttccttcctgcaataccagacattgaacaccatctttatagtaatttgcagtgatagtcccagtgtgcgtagaatcgcttgtgacggcctgataaccgaaccccttaccgtttgccttatttcgttccttacgctctctaaagcctttccatgcgttatctgagagggtgaatgaatcatcagcatcttcgaggatgtcgcctacgcgtgtaggtgtacgcgggggaacaggaaatgaaaagaatacatcatccaggaagcagacaataaacacgcgttcccgtctttggggtagtccgaaatcctttgtgttcaggcgttgatagaatacgttatatccttcggcctccagaagcccgtaaatcgttttaaacgtcttccccttgtcatgggttagcagttcaggcacgttctcaaagaacagcacacggggctttttggcgcgtataatgcggaggatttcgaagaacaccgtaccgcgtacatcatcgaatcccagtttcaatccggctttactgaacgcctgacacgggaaccccgccagcaggatatcatgatccggtactttgttttcatcaatggcgaatagatcaccctgtaggttatcatcgccccagttttcgatatatgtttgctgtgcgaacttgtcgatttcagacgttaaaaggcattcgacaccgccgaacgccttatcaaatcctaatcgaaccccgcccacaccagcgcagaggtcaattattttcatacgtcaaaatcaatctcgtcgattttgtatgagttttcttcaatgtccgcccatagggttacattaacgtgtttgctatcttcgtacaactggcgaccatcaatcccgcccgtgtaattgctttcggtacgttcagtaacttccagtcggaggctatcgcgcatgatctgaacaacagcctgttccagtgtaactgcgtctgggtttttggtatcgcccagtacaacatctttaacgttcaaaataacatcagtcattagtgccactccgttttaataccgtgtcggtatgcgtcaatccccagtggggtaatcagcaaccatgctttcgaattatcgtgataacccgttactcttcgagcgtaacctttttgaatcagggaatcacgccctgatttgctgggtacgtcattgaaatctaagtctagcactttagttgcgtatccgtaaagtttatacagaacatcaatttcagcgccggacaatttaggatacatcatttgtaataccccacaacatgatcgctgtatatgcgttcgatgaaatcgttccagaactcgcgatcaacttctttcggatatgttgaaatcgctgcaaggcgttcgacttcgcccataacttcttccagtttttcctgtacggttgcgaacggtacgccgccagctttaaccagtttcaggaatgcgctatcaggcagaggataaacgatatcaccatctttgtaaatctggatcaactgcataccaccgcgcaacgcgtgacttaatgctttccagtcgatcccgttgttggcttctgcttgtcgtgcgcgttctccgtattcatcccagagtttatacacagacttacgcatttcatcggctttgatcgtgaactggaatttacgccccagcacttcatagaagtcctgacaaccagatttcattgtcgtgtcggtaacgaatcggcagaactcgtttgtagggaaacgatccttgatgtcagacactttcacttcacgcgtatagcgtttcatatctggcgtgaattcctgaataccaccgatcgtttcggtttctttcagtacatcgacaacttcgcgcagtgcagccagtcgggaacccttcacgccatatttcgcggcttgcttacgaacataaccgaacaagccagttagttcagtggtgtaaaaacgccagcggttagcgcggatatactgccagatttgagagttagcgatcagcttgtcatccgaagcgtgaagcatatcgagcgctacggtatcaccatcacacgcaagactaatgaacttagtcagactatacaactgacggtcaacgtcgtctacggtgtttttagagcttttatcgcctgtgctggtgtcaacagtcttcggggctttccccaggagaatatcgcgcgggtgcgggagaaagatccctttatagtctttgtcgcttgtcggtgtgttcagtccgtacaggtgagaaccgaacacggtttccattacagttttcaaaattcaacccccagggtttttgcgataccgcgcagttcagcggtagtgatatttggtacacgcgttacatgtccacgaccgaacgcgtctttgattttatcagtaagttcgatacggtacaaatgttctttgtattcgtcttcgctatgataaccctgtgtatgattattccagtcattagcgctacctgtttttcgatcaagtcgctcaacacggaaatctttaatatcggtgatatttggatcttccgacgcatacaggtattgacgggcaaccttgatcacatacaaggtgcgaggtcgtggggttttgtgatgactgtatcgacgaataccaggatcaaacagggtatcacccactttcacatcagttaaatctatcatttcattttccaacgttttgacttttcacagtagaacaccggaagacgtgccagaactggcttcactacgtcttcccctgtgttcgtgttatgaaccacttcgatcgtaagggattgcccttcggacggccttacaatgtccagttccaggatctcacgattaccctttgtattgatttccgctacgtagtaatcgtgcccgttgatgtttacgacatcacccataataacgctaattgtgtgaatcatgagtatgcaaacttaattttaacattcagggaatccagcaggatcgcgtcacgtccatcaatgacggttaatcccatgtatttgttatcgtctgcgctcttacgggagtacatgcgacaaaccagagaaccatcttgtgcgatgtattcaacgtggtattcacggcgttctgacgtgaagatgtcaccaactacaacaggacgatcaacactttggcgtttagtcccttcataggacagtttgccgttaccgtctggggtacattccgcgcctttcaacaggatttgtgtcactcggacagattctacggttcccgcaatcaacattgctggatcagcggttcccattttcaggatcagcgttgaacttgttttgtatcgtgatggttcagtgacgaacacgtaaaccatatcgttcttatcacgggcaacagattgcagcgtgaattgcatttgacccggaatacccgacatcgcaatgtgaacacgattaccaggttccagcgccatacgacattttacatcagtgatcccgctaagggttgctactttcatgatttaattccttcaaagtcttcattagatttccagtacacgttaaagttacggcaatcgtgatcagaagtcaacgtatatttttcttttgttttctcgtcggtgatcaccatcgtttcattttcgatggaatccacgccatagacgaacactttatcaccgcgcttattcaggaacgcgtcacctgtttgaatcaactgccagcagttgacgggtaaaccacccgcacagatcggacggtttacgaggcagtaaggacgtttaatcatttaaattcttccattgcataggaagtaagatctttgaaataccttgcggtgttgccttctgggttgtttgtaatctccatcaggataacagcaccatcaactcctgctttcttagccatgaatgaaatggcttcggtagcaataatcgttgctttcataacatcagctttagaaacgttgatcgtattcatttttcttccttttcattattcatgcggtatgtgtatataatacaaaagccctcacgcgaacgcaagggcttttttaatcttttatcagagtcccgtgaaagccacaacgatttgatagtggtcatcgaagaattccccttgtcgttgtacgacctcatgtaagggcatccagaacgcctctaacgcatcgtcagaaccgcccataatgcggggcagactaccatcattgttaggctctaacttgatgtactgcgccacagtcggttttgagaagtgtacggaacgcttcggatgatcgaacagcatcgaattacggattgaaccacgaataaccttttcaggaaccttgattcgtacctcttcgagcagttcgcggatcgcacaatccaggaacgtttcatttgcgtttttgtgtccgccaggaagggctaacgcgtctttacctggtgcgaacttacgacgaattaccagcaggtgattgttacacacaaccacactatcacccgtacagcagtttagcgcttctgggtatgggtagtttttgaatttctccaattcgctttcccatttctcgtattcgtagtacagtcgccaaaatgtatccgtcatcatccatgaattgatataactcacagtagacgaaggaacataacgagatagtttcttatcccatccattcttatgcaaaaagatggttggtcgcaaatcggtcgcagataaatctttcccgtcaaccttaactggatctaccggaacatgagtccatccaaacgctttcagccagtatgaatcagcatccttttcgtaaccatagatcgcgatgttgtcgcctttggtttcgtcgattgctgtacgaacagaggttttccatttttcttcgttgtaaagataatcaggaatatgagcaaatttaacacgacaaacatcttcgtatttgtattcagtcatcagccacgaaaagatcattctttcgcgttcgttcgctgtcagagggtttaaaacgttagggtaagcatatgctgaacccagaaggatgtaaacggtttttgcttcttctaatgctttacgcaccattgctgcatgaccattatggaagggttggaatctgccaattacgacagctttatcaaattgtttcataacgtgctccacgtttaaaggttaatcataaaacagacgcaatcaccaatacaccaagaaaaccgccaataaagccgaagaatagcgaaatgaagatagtaaggatgatctgttttatgttcattatagtattctcgttttaggagtcaagcccccagagtggggctttaaaaccttatttacgagaatcgaaaatcacttgtccatcgtaacccgcacccattacggtatgtggaacaccgccctggtatttctctgcgcgtttcatctgaacgtcaagttctttccagcgaatcatttctggtgtaatggtacgctgcaacacggcgttcgcttcggcttctttcttagccgcatacagacgggcatcagcatcacgctcgttagcctgtgcagcattgctacgggcttctttatcggcaattgcctgaacaaccgcctgttgagcgatttgctctttacgtgccagttctgctttttctgcgttcacctgttcttcacgaattttcgtgttttcaacctgcttcttgatcgcttctggcagatcgatatcctgcaagaatacctgtttcacggtgtagccgtaaggacgggcatactcttcaacttcctgctgaattgcgatctgtagctggctttgaacttctgcgttatacagatcctgtgctttcggtacagatttaccgaactcacggacggtagacagaagtttttcggtcacgtacttatcaagcgcctgatcctgattacccgcgttgatacggttgatcggggctttgttaccatcgaactgcaacatcacggtcatatccacagtggatttgaatttatcctgggacggaacctgcaatttgtcaaacttcattgcgatgtctttggtgttgaacacctcgaaatcagccagtgggtttaccaggtggaagccaggcagaacaggcttcggtgaaactttacccatgaaggtttgagtttttaccgtaccatcctgaacgatagtgtacgagttcggaaccagccacagtgcagcgattacgcccagagcgatcagagtggttttctttgggttgtttacgatagtgtttaagttcatcattatttccattgggtttatgtttcaattcgatagttattctatcatcactttttcgcgtgtcaaactctttttaagaaagttttgtcagcttgtaaatcgtttgatagcacaagcctttgatctcgtccagaatgttcttcaatgaactatctactgaatcatagattgtgtcggcttcggttgctattttacggagatacaccaccgtgtcaagcacattttctgtttttaatacgggtttatatcgaccagtgataccaatatgaatttcggtgaatttatcaaccaaatcctgcatatcttcgtaaaaactctcaaacgctttatgttgagaatacgatccggtcgcaaagtgtgcgctatgcatgtatgttacagacatcagacacataccgataaaggcatctactttgcttgagttatcacgatctgttacttcgttaaatgtttgcatctttcatcccttacgaacgatgaatagtagcaaattcgtttgccaccctatagcccaggtgtttacattctggttcagtgcggcattgtttttgctgccattttcgttccatatagttatagaacaattcactggtatttacactgggagggattgtgtcaagatagacctgtagcgctgcattgatgtaatagtcgaactctttcgggacgacagtatttcgatcagcatgtgatgcaggagacaagattaacaatccaaacatcatcgcttgtgatatgcgtttaatgttcataaacatttctctacgtacacacggatcaacaatagatccgttcctgtatatatttatagcaaaaaaggggcgaatcgccccttatgtaaaattagtctaaaaatacatcaagttatctcataccagcataagctacgctcaaaagcgcggatcttatttgcgttctcgatattttcatcccatccaatcacgccagctttcatccggcgtaactcctgacgcattttagcgcgtactttcgaatcaatctttttgactgcgatcgaaagcatcgcggagatatcaccatgagctttgttaccgtcacgattcaggtttttatcgaatcggatatatgcacaacctgatttgtgtttccagttggttgtgtaccaacgcaaaccatcagggctttctccgtgctgtgcataatactgtgaaaatgcttttgtctcttcgatttgttcgatagaggacttatcacggactggaacatatttcttacggtaagtacggctcatagtgttctcctttgtttgtctgaatacaccttaacagttcagaccaacattatcaagaagtttttcgtgataatgtttgcgacagagcgaaacgtatttgtcttcggctccgatctcaacctgcgccccttcggttacgaagttgccttgtgcgtcgatacgtgcaaccgtagttgctttacgcccacagtgacacattccccgcagttctcggatctcgtctgcccaggccaacaaccagtaagaaccctcgaacagattcaactggaaatcagtacgcagaccgtaagccattacagggatttcgagttcatcaacaacgcgacatagatcgaaaacatttttcttcgaaaggaattgcgcctcgtcaacgaagatgcaagcaattttattccggcgctgaatgtcccagaacagatccatatcaggcgcaatcaattcacacttttcgttcagcccgatacgcgaactcactgtgtttgatgtgcgggtgtcgattgctggcttatagattacaacacgcataccgcgttctttgtaattgtgcgcgtccgtcaacagtcgcgcactctttccagcgttcattgatgcatagtgataatacagtttagccaattgtaaaccatccgttacccatgagttttttgttacgtcgcgcaagatgctctttgatttctggcatctggatcgcaatatcatactcttctttcgtcatagtatgatttgcgcaacccatacacccgcacacctgcgcgttacaccaacggagtgttccgtatgtcgcaatcaccttcattgctttagctttgattttgtcagtcatgattataaccgcccatttcgctatcttgtgctttatggatatcaagataccacatattgattttgcttttcagttcgcccatttctttatccagtccttcatcaacaagacaaagaatgtcaaccaccgttttacgctgtgtgatgttgattttgttcgctttcatggactgcgccagcgcttcacaggttttcaccagtgcggcgcgttgtcctttgattgcggcgatccgtttgttcgctttcttgatcgcccgacctgctttgataggatcaatcatgattagctcgctccactgctaccgcatcacgaaccgcatcattgatttcattttcaacgaaatccagaatatccgccgtaatgtcgtcaatacaggattgattgtagttgcgtgaatcaggatcgtcatcttcggcataatcctgatacgcttcgcccagttgtttcagtttatgttttaacagcttttgttcttgcggtctcattctctcgcctctttacgtccggcatcaaccaggtcatccacaaagctaacgatatcatcccaccaatccagcgcttcctgtgatgctttcgcgtcaccatcaaggaaacggtcacgagcgctcgcaaacttctctattttgctatagagcttttctttatttgcttcaatcatgataagtccgccttacgtggatcaaccgatggatcgaagtgaacgacgatgatcgggtaatctcccgtacactcgtcaataatagcgctaatacgcaaccaatcgcccccagcaagccccgcaccgataagaggggtaatgataggcaatttttcaggaaacgcactggcgcgttctacggcgctcacaaagcatgaccggattgcatcataatccacttgtgggccagtaccccagaatttaaactgggtgtatgcgttgaagacaatctgaccttcttccgtcatgtagatggagttagtgcctaacttccgctgatcgcctttcatagtcagtgcatcaattttgaacgcaccagggattttgtgcttcacttctttagcaatacccgcgcccatgttgcaataacagttacacccatgaatcaagtgtacttttcgtttcaggaacaactctacagcgttccctttgatttctttaataatcattttcatcacctgtatagtggcggtaagccagcacagccagccccgcgatcacaaccacaacacacattaagatataacctgtgttcatttaaattcatcgtcccatctttgccacgcttccaactcgtcatcatatacagggaacgagctttcgtttggctttttaacgtaataccagataatgattgcagcagcaatcacacacccgtaaaagattactaatcccatcatcagtataatcctatgccagcaacatattcatcaaccaggtaagtacggagtttttcacaacgttccttatttggcgcattggtacagaggttcatcattggttcagactgtaaaaactcatgcagtttaaccaacttctgacgcttgaagaggtgcgcgttttcttcgccccacacataagccgcgtccagttgttcggcaatcacctgttcacataccgcaacgtctttaatgtcacgattattgcagagttcagccagtcgatcatcagcatgtgcaaagccagcaaacagagtgagtaacagcgcaagttttttcatcgttttaccttagtatgaatcttcttcgataggggtataataatgggtttcgcagatatacgcaagcactgatcgcaaactatcgctttcaaattctggcttttgattgagtttcaggctccagccagtgaaacacatccatcgttcttctgcaacgtcaaatgctaaccagtacgtattgaactgtgaacatgtatgttcgaagatatcgaacagtaatttaccgccgatcggcttcacatatggcttcacgcgttgaagcgatttcagaactgattcgaggttactgcgatcctcattcatcgcaatacggagaatatgctgattggtttctgggttatacccatcgatcgcaagtcccatatcctggaagaacttagtcgcatcacggaaaatttcatgtccgctgttcggggaattgatgtagaactcaatgcgttgttttggagtcatcgcgcggacacgggaagcggttttgtgatcgatctcgtctttgacctcctgacgggctttcagcaacccgttcagcttttcctgatagggttttacaatcgctcggatttcgtcgatacgttcatcaataattgctaactgctgttccggtgtcagtttagtttccatgttaagcccctacgcgcacaaagcgatcttcaattgcatcattaacacattcgtaaatgctaacgtcattcgggacgtgcttacgaatacccactttcacgatatccatgatctctttgttgctaccccacacgttcaggttgaagtaaacaccgccgctatgaattgtgttgttaccaacatcaagatacgtatcttgactttcgcagataaacagtttgcgtttttcttctccatatgcgaagtagatactgaacgattccatacgatgacgatcgaccgtgatggtttccactttaacctttggatctttgttcagttcatctaacacaccctgaatgatgtgcagcatgttcggcttgatgatagtcgggtgactggtgataactcgatgtgatgtactcatgatttaatcctcaatagttggtacacacataataaaaaagcccctgcgaaattgcaagggctttttatcagataatgcgtttttcttctaacagcttcgcggtatggttaaccatgcgagcataatcacgggcttctttctttgaatacttgaaccccgcgttgtaactcgcaagcgcctttttcaagtcgcctttgtggtaatcaagccagtattccagttcgtgaagtgcgtacttggaaccaccccgaagggtttcgagcttattgattactacgcgtttggaatatgatttatccattcgtgcggacgcgctacgggctgttacttgaaaacaaccataagcatgatgattctttttgcctttccctacgttctcacatgcgcgagactcgatccaggcaatagccgctaaatgatatcccaaacgtttcgatgtttccgattcaactggctttgcagttttgcgatcgtactcatttccgatcctgaaagcgtactccaaaacctttttctgctttggtgtaatatcatccaattccttaacatagctgggggcattggctggcgctttcttcattactgttgcttgttgtagcggtaaagttgacttcacagcggggagtgtttggataaactctcctaacggatcagtcgccgcgttgccagaaaaagagcataagaaaatgctggcagcaaagataattttcttcattgtaacacctatttgtaacaagagagggctatgataccctcgtcttattatttatgcaacatttttaaatgggtttcgccgcacgtagtcttgttcgcgattcatactactacatccttatcacagaccggacaccggatcacacgatacacatcacgaccgccagtgtaatcagtagataccttttctttgacatcctgcgcagtgtatgacagaacagcaccacaacgacaggcagtttgttttggggtaatgcttacaacttgaaccataataacctcacaaaaatagtttcacttcgctaccgcatttcgggcagacgatatgttttttcacgatgtaatccgcagcacggaagaaaccgttgtagaacacttcgtttttcttctgtacatcagacagttcatactctaacccacttttgcagttggcgcaaacggtaattagcttatcggacggaataatgttaatcatgtatacctcacgaaaaaaggggggacgaagcccccttgatcaaaaattgtcttcaacaaaagctgcaagtcgcccacgatatacggtatccaggatcacatgacttgaatgaccgtactctttaagtttttcaaccgcatacacaaagccgttgttaacagcagtgttgcgcgggttgtcaatctgtttaatgttcccgcatagtatcagaagggtgttctcaccgcaacgggaaatgatggatttgatttcgtgattgctcaagttttgacattcatcaacaatcagaaccgaacctttacccggatcaggatgcccgattgagcgcccacggaagtaatacaggctagggaactggacaacgtttttctccagcagcccttctacgtatttgtcaacttccggttgatccttaaacagaatgttcaggctcgtaatacatggttctacagcaggacgcagtttttcgccaagagtaccaggtaagaatccgatttcgcccgacagagggctatctgccttgacatacatcaggtttgcgaagtgtcccgcgtttaccatgtgcattgcaccagcaacagccagcatggttttacctgaacccgccgcgcccatgatggtcacaacgtcattgtttttgtccagaatagcatcaacgaatgacgcttgcagagcatcgcgaggctggattgttttcatcagcttacgctttaacgcctgttcgtgcttaataggcaacacttcaagctgatactctccagcagccactacacgccctacaagttcaccatccgatagaatgtattggttagggtagaaatccgcgtcaggaagcgatgaatacgttataacggcaacaggcccgacatactccaggacttcaacagtttcccagaacagaggcaggtcgatataacctgaatacaacacatcactatctttcagcgagtcatcgccagtgtattgaagaaccgaacaacctttagacatcgcgatcaacagcatgttaatgtcacgagtcaccagagttgcgccctgctgaatacaagttgcaatgatccgcgcatcctgtttatccagagggaattcttcggtgccgtcataatcgacgattttcagtgttacgctttccggtactgctgggttcgataagtttaacgaaactcctgtttgggtaattgcttcataattttgtcccaggattgctttggacaaaagccggatcgccagtcgtgcttcatgagcggttcgctctttgcttttcaggtgatccagttcttccatcgttgcagcggtgataatgatttcgctgtcaggttcgatgtaagaatagattgaatatgggttactaatcaaaacattggtgtctaatacgtattttgacatacattaaccttatgtggtttcgttaaaaaatgtgccgaaaacctctttcgctttccggtcataaacggcttttgcttcttctggagtggtataataccccaaaaattttctttttccatctatgtttatctgcgctttgtacttcccatttgctttgtgataagaaacacctttcaaccccgtactgctgtttgaattacatttctttttcatcgcgttttgttggttcgtcgctttctgtagatttcttgctgtatctccattttcaacaccatacacatgatctacgataggaggaagataaccattctcaacgtaaaacactattcggtgtcgcaaatacatagaacctttaaaatgaatttgggaatactcgttcttgcttccggcttcacttccaggagacatagtgccgcgctgaattttccaatacacttttcccgtagatgtatcaacatctacataactcagaagagactcaatcccttgaatctcttcctgtatggttcttgatgaataaccatgacttttcattacatacccaaacggataatatggatatatgggaacgggtgaagatgacttgaacgcatacacaaggtcagcgtttttgccagttcaaaccgttcgtcgatcgtcgtgtcacattcatcgaaaatcaggttgattgcctgatacttgatggtctgaccacgaaagattgtccgcaaatcctgttttttggaaaggaggatcacgttatcatccccgcgatcgataccatttccgattgcttcatccatcgccatttgtttcgtacaagcaacgtagatattcagtgtccctttcgactgcttgatgatatcgaaagccgctttggttttacccgacatccggcccatatccagcgcagtttcgaagattgacaccccgccgcattcttgcccccaacgcccatcaatgattcgcgcaaggtgcaggttacgtgactgctttacagcgtcaacatagaattgtgaaatcatgttgtcgccttatgcaagttcaacgtgtggtgcgtcgataaatttcgtttcaatcggaaggtttggatcgttcttccagttgataccgtaacgcagttttacgccctgttcatcagcggcttgtttcactgcattcaggacaggcaaccacactttcgggttagtctgccagccagcagggagaacgctaggatacagatccacagcatcaccagtgatgtgttttgagttcatggtctgggaaacacccttgcggacgttctcgcgctgttgctctacggtgcgcagaccttcgcgtacaccaaaatcaacaggcgagagttccaaagcacgttttaccaccttaaccagttccggcttcacgccttgcaggttgttcaggcttttctgactaaatttaaacatacatacctctttatgaaaataccctatgggctacacagggtatttacggtttaagaggcgcaacgttttacatgtaaccccaaattgcatcttccgcgcgatcgcgtttccagcgaatcgtcatttcaacactctcctgtttgtcatcaggaggaagtttatcattattgatttgttcaatatatgcttgcgcatctgcttcgctacggaacaacgcatggaaattataatggttgcgcccagttacgttacgatcatccagagagaattgacctttattttcccaatcatcatacacagtgattccgttaacaaacagccccagcccacgatgttcacgcgggaagccagtgatgatatgttttcgacccatctgtgccttttcaccagtgatactgattacttcgtacaggattgcgccaggtttgatatctttcaggacagcacgtttttcaaaagcgttcataatgtattcctcacaattagttttcatatacagattaccacaatctgttttgatgtcaacaaggtctatcgtttttatttgggaaagttaactggaacaggcgatcgtgtaatgcttcgatccgctcatacgcttgtttcaggatcgtcttatcttctgggttcgttgtctcgatgcagatcagttcgtccgagtcgatagcgatcacatcatccatcagtgaagcgaatatgttcacgtcagggtgtgtcaattcctttatctccgcttccatcccgtcatgctgggataacagttcgatgatatcgcgctgtaaatctccctggtacgggaatccggtttgaagatgattgataattctttctgctttggtcatatttcacctacaaaaaagcccctttcggggctgggattaaatgtctttgcactggcaaacaccgtatttggtgaaaggcttgtcaccgctaaggtaagaccagaaatcgcaagcctgttcagcggtttcgaagattgcagcatcatagaagccgtgttcttcgttaccatctttattgaggaacacaggaagccagctttgcggtttgaagcagtcagtaacaactacccaaccttctttcgctttcattgcttctttgttcgcttcaaccatttccagcatttcgttcagtaagttcattttaatccccttgtttatctgtttcgttgtctacgagagagatattatcacaacggggattagtgtcaacagttattcgaaacgaattgtgctatttttgaaaaacattccagagcacacagatcctttgatctgcttgccgttcacaccagttgcttcgaatccggttgagtatgtgtctttttcagaacatgcaaaccacttgtaacccgtgaactggatgttcgtataaccctgtgcttccaggatacgatgtgcctctttctcgtcagtacagcttgactgcaagaacacaacaacgacaaccatcaaaatacacacaacaattttccacataatttatactcttttaaggttagttttgctggcttcgatccagcttacttggttagatccaatatcacccagacatacagttgtatgactaaatgtgttcggtaaagaaacatcatcaggagataacaacaaatcatgtacacttacgctggttgcatacaaataaccaccggacgtatacagtgtttttatgaaatcatatgaatcgttgggccacttgaaacggtatttctggttccagagttcaacttcatgcacatcatattcatcgaacaggggatcgttgccctttgtcgcttcgtaaagcgcaccgcgccattcaactaaatccgcttcgatatcacttacacaaaactcttcttttgcgctaagtttatcaagcatcatttcaatagtgcggatagccatgcttaattcacgatcgagtttcatacaataccctcttcttcgagcacttcccagatcaggcgatccaggtgcatcaggttccacataacggagtcatacgaacccagcgagcgggagtaaatcactccccatgaacgataagccttttggaatgattcagcactgttttcatcgtgcggcatatcgtcacccgaagcgatcagcagtttcagaaccatcaggctattgagcgcctttggcgtgaattcctgttcgcttaacttcatcgcgtaccgttcgatgatcgcgattgacttcggatctttaatacgcccatctgtacgacgcgttttaaacgcgctcattaattcatcaactacggcggcacacttcatatgcttcatccttttcctgtacagacatccgattatagcggatctcttcgcgctgttcaacttctctcacggcttcggctttcttttcagcggtcagtatgtgatgtactacagcgtttcggattccccagagatattcaatcatctgcatatcttcaacggtgtgatagcctttcgcatcacattcaaatacaatttcatcgcgttctgccattgccacctgtgcggtagaaggacaaataaccattccagagtatttttcaatcaacgattccagtgtacgcggttttgctggaatgtcaatagataccggaaccattcgcatcgttgaatcattatgggattgataaatcatcagaatgtaatctccgcaaactgcattctacgctcaatcgcatggatagcgttatcgcgctgttctttgttttcatatccagcccaggtaatcggggttgaacagatcaggtgaaaagtgattgctgggtgtctcttcccttcaacaacgattgttgcatcatcttcgatccaggttacgtgatccagattcaccggatagtttcttacggtaacagtttcaccaaccaaaagcgacacgtccagaatatcacgatcgcggacatatgatttaatacgagatacgattaacattatttcaactccactgcatatacatcggtttcaggggctttgtgtacgcgcatatctttaccacataccgcataagccggacagttacggcaaccgttatgatccttgttgccagtcagttctttacggaactgttttgttttcgggtgttcccagatatccttcacaaaatcttcggcttccagaacatccagaccttcttcccagccaccttcaacccagcgttcggtaaacgagcaagggaagaactgaccacgttcgttgatgtaagagctaaacatcgtcgcttcacagtcttcggcgtattgcttgtactgttcgaagttcgggtgtccctccatcgcttcaacgaaagcgggggctgaacagctatcgaatccaaatcctacaccagaatcgaggcaatattcaacaagttttttatattgttcgcgggtaacggtgtcccagttcttaccgcgtcctttttgtttcagtcccaggaacacgatcgcgtttacttgtttcaggcgcggatcattcttcacggcatcaaccacgttaaacgcgtcatcataggttttcgagctaaccatgaagtgaaggttgatttgctgttgtccggcttctgtcaggttcgctaccgagtcgaaagcgacatcaaagccagcgtgtttataaaccgataccgcaacagccccagcaaccgccgctaaacgcgctgcaacgtcttttgatacatcagcaatggtaaggttcggcacaatgcctttagaacgcgcataggccatcatatcgaacatatcagggtttgtttgtccctgtgcatcagcaccgagtgcgcattgagttagccagggcattttgtcgatgatttttttgaagttggcaagatccatgttgaacccgttcgggttattggacttgtagcagaacccgcagagtttacccgctggcccgttgcatttggtagtgatctcgatatcgagaatttcggggaatggtgcgtattctggatcgtgggaatatgttgcaccccagcgagcgaattcaccagtatcaacgttgaaattatagttgtagaacttcgagcgagcgaagcgcatattgccgtgttgatagatgaacagggacggcgctttgatgctggtaacgatatcgacagatttcataatataattctcaaaatttaacatgggattggaagacagcgcgagcaaggctttcattgtcgaacggtatcgactggtgtttctctttgctgtcaatgttaacgcgccagaactcactcgaaccgtttttggtggagtaatgcatcagcgttaccgttttattcttttccaggaaagtacgtttgtcaatctctgttttgagttcgtgttgcatcattttacactccgtttcagtttacgttcgtcagccagttcttttttgtacagtttaatgtacttcccgttaagggtgcgaagctgttggaaaaccttgttgcacaaagcacgtttcgctttgtattccggtgtattacggattgattcgatcgtcatacccatttcgtttttagggtaagcgcttaactccgctccgatctctctgtaccagttgcttaactgatcacgctgtgctttgtactcttcaaaagttaacattataactgatctccgtaatctttcgctgcatcttcgggggttgcatccagtcggtaaagctcaacggctaacggactgggtttgatttcgcggttcaggatctcactgataccgcgaaggaattcgatataaggacggaatctcatttgatacgtaccgcgttaaaagcctggttgcgcagttcataagcctgttcaagctgttcagtagtgaacagagggctatcggtattagtggtgaaactacaaatggttttgttgtcggcgttgacttcttcaacaacgatttcataaccccatgccccactgtactcacatttcacgttccggtacttgatgtaaactgctgcaacatcttcttttttgtagttccggcttttgtagatgatttccatgatttcctccttcgtttcgatgtgtgtacaataacagatcagggttatggagttttagcaattcgtgctaattatgccattttcttagcgattttccatgcggctttgaacgctggaacatcttcaacatcaacccagaaaccagaaccgaaaccatcgttgtagcaagggcaaccgtcgcagtagttttcccaggtcatcactttaccaccaacagaagcaccagtttccatcgcacgtaatgcatcttcaactttttccagtttttctgcattgtcgtcataaatgatgaagtaccatttgccgttgtattcgttacccagtttgattgcttcgcgaacaagtttcatgatgttttcctttctctgtttcgtttcgatgtgtgtaatataacaaaagcccctggcggttgcaaggggctttttaaacaaaaagtgctattttgtttcttcgaggattcgaaggatttcggcgcgggtgattggatgttttgccagctcacggatcgcgtggtcaacgtgtatcttacacatcaaaaacttctccccgcacttgtcgcatgttgcatacatatcgccatgtatacgcccgattgcatcagtcacccaataacgcatccatgcataaggagttccccgcatccatccggtagcaacatgattgcatttacgtttaccgaacatattaccacccgttaggattgcggaaatgtgtttgccagtagcgcagttgttcgcggttcatgttttggttatcaatcaccataccctgaatcatctgcaacatcatgcgggtttgattgacatcctccaggctcgctatacgctgttttaaggctttgttttcctcttctaactcaaccatacggttgtatgcgttgacgcgctccagaggcatatcagggcgctctttgaggacacgggcgcgggatacttcgcattcgtgatttgctttccagtgcgcggcttctgattctgctttttgcttgtctcgaagcgcgagtgacagatcgctaaccagatccagaaccgtttgcggatctacggtttccagatattttccgagaccctcttcccagcttttaatctgtgtcgggctatcgccataaggaacaccgtatgagaacgcgcgtttatactctttacccctgaaaccatattcctgatttccctggatgctcatattttcaacgagagtccacttactacccatcatagaagaaatcgaacgggctgatttttcaatttcttcaagtttttcacttgttactttcattttgtactccacaaatcatattgtgcgcgaaggatagcgtaaaggctaccgatattgattgaatcgaccggacactggaacatatcagagcgcatcatattgaactcgatactgttctgttcaacgaagttaccgatcattgatgtccagcccatcaccaggttatatccgtcttcggataacccgtaagccaggttaaccctgatacaacgcttatcagccagttctacgcggatacggttgcttgtgttagtcactttactggggaacttacggaacatctgggtaaggagtttagccgtttcaatgttgatcgcgcgttcctgatccctttgcgcctggttgtcatgacggcgattcagatacttttccatttttgggttgagattcacatgttgcataatatattcctcacaggtttaaagcgttcttttccggttccattacatgaactgcatttcggagatcggtcgctatcatatcgccccgatccgttacatgcaacacatttccgtaatttccagccatacacgaaccgcatgtaataatcggttcgtgcggccttgcgttcgtggaagttcatactttgttgtaaacctgaaccagccacatttcgatgttcggcgcgtaagtaacgtttaccatcggcatagtgcggtatttgtaagcggctttgtacgcatcgagttcagtcggaacacagaaagagaaaccgttgtcataacgttctgcattagaaacttcacaaccaactacagcggcaatgtttttgttcatgttcatgatgttttcctttctctgtttcgtttcgatgtgtgtaatataacaaagcccctgcattgctgcaagggcttttttcactttaatcgaatttttctggcaactggtctacaagtgcttgagtttgatgaagttcttcactcaatttatcacgataatgaaccaattcgcgggttctggatgctgaatagctaatgattttatcagcgttagccatgtaaccgtaaccagcacacgcgatttccagttttgcgttatcgccgttaggtacgcggatatgagcatacgccagcaagtttttaaccgcttgcaacagttcatgatcttctttgccgatgataaactggtttggttctgctgaatccatatacagttcttcgtctttgttcattttgcagccttatacatttcaaggacgcggttcatatgctcttgtgattgaggcacacccgcgaagttcagtttgatgaagaattccagacgatcctttttggtgcattcatccagccccagggcaggtaatgaaatgttttcaaaggctcgctgttcgtgtcgtggcatttcgtcccagaacaaacgggaaccgtccggcataggaatcccaatttcaccttcgtagactttgataatcgtcgtcaggcgttgtttgccgtcgatcacttctacccagtgagtttcgttgaactggctatcaaccgcgatcgcgatgataccgcaagggaaaccactgatcagggtagtcagaaacgcatcttgctctttctgcgtccacacataggggcgctgataagatggattcagatccagatctttattcttccaccaatgcagataactcccaaccatgatcgcgtgatcgcgactgcgaaaagttaactgatcgcggatacggttatgaaccggaatatcatctttagacatgattcaccacccaacccaacaaaccagtattgatagccgcaacggtaaggcaaatcaccgcatacacccgcgcgttgtgaactttggttttcagttctgcgatctcctgatccttttcactttcgaactcttcgcgggttccatagtaaccaggatcagcagcggttgcgggacgaactgcatctttttcaacgatggttgcataaccactcgttacttgcgttgcaccgtaccagtcaccgcgatcggtgttgatgatcaagtgatcacccttcgcgttagctttatgcttcgacttgccaatgacaattacacgttcaccattcataatataatcactctttcacgttttgttgtaagaactctaacagctttccttcggcctgtaaagcataaagtttattcagctttgctatgttctcaaagtctgatttttcgctgaacgaccagacaccatcatcggaaaccagcgcaccaaccgatacgccagtttcaggatcacgcgtcaacgccagccccaggggatgtaggatatctttattgattttccagatcaaccccaattgagataaggtgttgaaatcaacgtgactcattaggcatcgcaccgaatgacagcagccccatacgatgatcgttatctgattcaccagtgctgaattcaaattcttcaccgctgatactgatagcacggaaaccatctttcaggtacggcaacagatacagagggatcagcatcatttttgaatcgtcatcccacttacggaagcccaggtttttcatttcttccagagtcaggtcatttggatcgactggttcgaaatcaggggaagcgtaaaggcgtcctggaagatcgcgaatatttttcacggtgaatgaatcaccccatgacttatacgcgataggttcagcggcgcgggttgcggtagccagaaggatcatttggcagatttggaaagtagttgcttttggtttcatgatgtatatcccacaagtttagtcagtaaattccccatagtcttacgcgcatgatcgcggatctggctatacggaacatatttgaaaccgtccatttctgtgatggttcgcccgttcttcacgaacgttgacgcacagaagcatttatcggcttcggggtaattattgcctttatacacgaataagtaaagctcttttttactggtataatccagtcttccgaggctttccagttcgtgcggttcaacaagaactccggtttcttcgaagcactcacggatcgcagcgtgaataggttcttcgcctttttcgatatgcccctttgggatgtcccaatgaggcgtttcggttgcgtggcccattaaaacgctgccgttattcaggaagagaataccagcagaccgttccattactgcaccctgaacttacgatcgtatgctgccagcgctttatctgctgcatcaacagcctgtgtgtgtttgttagcggagttctcgctaaacacttcgcggtaaatgctaacccagagagatcggcgggtatgttcgctttcttcgttgacacgagaagccgcaaaagcgttatgctctttgatcagttgtgcgaattcagcataatgatcaatggtttgttgttgaatagctgtagaagtcataattcacctatttctttcagttcagttttgagtttttcgagagtcgattggtactgaatgccgttttctggatttggcagacgggcataatacagcgtaccagttttgttgatgtctgacaacacctcttgatcgagggtagccggatcgatgccaaaagccattttaaacatggtttccgcgtctggggcgaatccgtgagagaatgcaaaccccagctttttatcaaactgcatcagggatactttattcactttttccataatgttcttcgtaatcctcgcattctgggagataggtttcgcagaacatacacagcgtgaagaatgtaggctggcgaattccgatattatcgggtaagtacatccagaacgtgttagcaaacacgatgaacgttttcaggttttcaacggttacggtactgataccgtcataaccggattgagtaattgcgcgttccaggggaacagggtattgctcgcagtagttggcgtaatgttcgcttgtcaccagcgcattagccgcttttactagatcggtaattttcattcaatatatccccaacgaatttttacgttatcttctgacgccggacttgtaggagtcgggtacggatagctttgcgcttcccacagataaacaacagcatgttttgtcaattcttcgataacttcatcgaaagtaccgacactggtttgtaaaggcaacgagaaaggtttatcgttggtttctacttgagctattggcccatctaccaagataacacgaaccgttgtgtgctcagacatatgagcatagattttgtttttcatgcgggtacatattccactttgacaggttttgcgataaggcgttctttagtgaagccttgcccgttacagatatcacaagtaacattgaagtcttccatctgatcaacccagccagaatccggtaagccagaaggatacgtgttaacacgtttgacttcgaaccctttaccctcgcatttcgggcatttgtgtgggtactgggatttaaccatactcagcagttgccccagcgttgttgaacgatcgaagcgttcgaccagtgccattacatcagcaatacgaatcgaaccagcatcaataacggtatacaggtttttcggtacatttgagcgcatagtatatttctcacttaaaaaattttttgatgaaagagaggaacaatccaccaccgaacatgatccagtatcccgcgccgtcaccgttaaacaggacatacacagcgacaccatagcaaaagatttccgcgatattcagtaagtttctcataactccctcctttgtctacaccaggtattttaccagaaagtagattactgtcaacaacaaagttttatcaacccacttatcaccagtcattagtaatcccctacaggttgagaagatgcaacgctcaggatacggaaagagcattcattccatttgcaataagttttcgcacagtgaacagtgcctttcattacaaacccgtttgagaacaccagccagtaaagtttcatgattgcctcctttgtttcgacacccctaatataacaaaagcccctgcacgaatgcaagggcttttttcaaatatttttcaacatgtgtagttgaggcggacaatcttttgaagcaatcaggcgatccaggcgtgacataacgcgtctgtagccgtcatactcgaacttgattttaggtgcgatgtaattaacatggatcgcgtttcgcgtgttcaggctcaacgtgtactcagggataacggttcggaatcgtaaagcaatcactggcttttcgtgagcaaccgaatcatccatgttttcgaacatctggacggtgaacgcacaggcaaacactttgccattaatccggcgatatgcaatgacttcctgcataccttcgtttttcgctttcaccgcgtaatacagaacgttacacgaataatgtttagcgagactattaagaatttcactgtagatctcaaagtcttttttgactgacgcggaacgatccaggaatcggtctgcgatgtgatctgtagtcattgaaacctttgtcacataccaatcacttaacgctttactgaaattttggttaacttctctgcgtaagttattgataacatacatcaatcgtgctctgttcataaatcacccattatatttgaaatactcaatctggcgcagacgtttttccgctgcctctttcgaatcatattcaccaagttctttcgtgcgatcatggttcagcacaacccacttatcgccgcgatgttcgatgtgctccgtgatgtcttcgactttcttatccagatccagcggttcagcatcttcccggatgatagtcaaatctacgggcaatgtcaacagtcttttaactccgctgatatcttcgatgcgggaatcatacgcgagggttacatgtggtttgtaatcgtcataatcgtatgttgctccagcatccattgcatctttaaagcggctatggagataatcagactccagaactcccacgatcgtattaccgtatttcgtttcccacttctccacgtcaaccagtcgggcaggttcagagataccggaggcagggaacagatcaaccgtcttacggctatacacaatcgttgtatgcagttttgcagcggaaacaggattctctacacccagaagtttttgcaccttcgcgagcgcttcacaggaagcctgatcgaacttcgcacacatatagatccccggatcaactacgggtttcgctacttcaataaaacttttcatgtgtactccaaatgaaaaaggggctttcgcccccagtggttaaacgcctaagcgttaattatgcttttgatgcatcaatcgcttcattatcaccagcgatttctactgttgctggcagaagtgctttgatcgcgccgatcagggcatcaggggatacaccctgcgaaccgtcgatttccagaagaccgcaaatctggcctacgagttgacggtgatttgccagttcttgttctttaccctgaatgatttcgttcaggtcgaatacacgggctttcaggatcaggacatcgttttgaagctgttgggtttggttttgttcagtcattgtttacactcttaaaagattgaatacattaagcacgttgcgtttcaaatcgtctaacgtaccattatttaggattgtataatcactcaagccaggtgtcaaacctttctccgttgaatgattatcttcaataccagtttcacgttcaaggaacacaaagcgagtcccgaacttgctcaggtatttatattcgtgcggttgacgcacatcggtaatgataaagtgatccgcgtaggatttcaacattttttgaagcgcaattgaagtccagatagacggatctactttacaaacaatatcagtcccgaacacctgcatcaaacggcgaatcgtccagggctggctgttttcttcgcaaattttatgagcgataacatctgcgttactcatgaagaacccgcgagaacttaattttttgataccgctagaaaacagcgcgtatgcatcgttattggacatcaccagcggggcttcacgatcaccctcatagaatgggttcttcgctgccagcgctcgcaattgcgtgttatcgtgatgttccatagaacgtttcaggatagctttgatttcgtcggctaacgcaataacttcaacatttcggaagttatgcacaaccatttgagcaacggtatctttacccgttcgctttttaccacaaataccataaatcatttttgcgttttccgtggagtaggcacgatcacccttccgtcgatctcaatttccatgtgagcgaagttgaacatcgtcatacaggatacggcttcatccgaatcattggtatacataagctcaagctctccgaggttggagggccaagcgccatagaagcgaaatgtcgctacagtttttgactgcgagttatccaggatatgcaaagccattgcctgttgtggttcactccaacgcacggaatcgaaggtgttaaaatcgacagtaccgagcatccaaaggtaaaccccaagatacgatcgcagttcttcatcaacagcaaaacgaatagtcagtggatcgaactccattgcagatcctgggatcttccctcgaatcattgggttcagtgggacatccgtaattggaatgttgatagcaggtagtgtaacaccctgaacttgtagtttcaacccttttacataatcattgtcaggaatatctaacatgaagttagtaggtgaagtctggttcaggatcatagcagttgtattcatgatgatctccattttatagatatttagatcaagaccgtgagcgaagcgaacacacgaacgaagtgagtgttatgtacgatgtactgtttataatatttatattttatatatagagaaaacagtacatttccgtatactttttatacaatcgttaactatccgtcttcgcttcgcttgacggaactcgcttcgctcgtaaccttgaataatttagttgatctattcaataaataggtatatcatacccatactttcaaaagagattgaaaacatgaaatcattcaaagaactactttctgaatctgttcagaacaaaaaatttgctaagaccgttgatctggttgaccgtggtaacgctgcaaaaggtcagatcggtttcctgcatttcgcacatggtgctgattacgatgtgtatgcgccggactcccacgatctcgcttacttcggtaaaggtgttgtccgcctgaaaggtaaaaccactggcaagactcaggcagcgtatattgactgggcgaaaggtactgtttcattctacagcggtgatcctgctgatgacctgaaattcgacaagccactgaaattcaaaggcgcttctctgtacaaagaagcagaagaaaacctggatctgtataatcagttggcggaagatttcgaaattgatctgcctctggatgaagcattggtgaaaggaaaggtgtacaagctcccaagtaacgatatgtgcttgctgtataccggacgtaccaaaaccaaagaaacaggtgaatacgccgtgtttacggttgtagatgcctctggtaaacctcgtctggtatcgggtaaacgctttacccaggaatacaaaggtgatgttctgtctaaactggttctagctgaatcagaagatttgaacgaagccgctaaagatattcgcgaaaaagttattgcggtgttggtgaaacgtgggtttaacgaaaaagacgcagaaaagatggttgataaaaacctgaaagatgcgatgaaggttcgacctggcgcaacccctggcaaactcgcggaaatcgtgagtaccctgtaaaaataaagccccttcctttcggttggggctttttgttaatatctgttccaaactttcttcgcgctgtatggttttcctttggactggaaagcctgtgtaggcaaccaaactgctttcgcccaatcttttggggcgatctctgcaagtggtgaacgtagatgggctggcagatatgctttgatcatttgatcagccccgcgcattcccttcacgttgttccaattgattttcagtctggttttgttagaaagtcgatctgttgatccgtagccacgtttcaggagttcttctaaaaactcttgacgtgctcgcggtggcgcatagtgcaagttcagcccgtacagaaccaagttacccgctttcgaacgtcctgaacccaggaaaatgatcagcgggaaccgatcccagtatggaagggtgtctttgtatttcgcatcgtagatgaacgtatacaagcgacccgttgctggtttcgcaaccctgtgcgtcttaatgctggttttgatgaaatcaccaaaccaatcggtcgaatctttctgacgtttcgcagcggttacaccaacagtcattttcttcaaactgttgcggaaatcgtttacgatatcaaccgcgtgttttttgcgatagtcattacgtttgcgtcgggcttcggtttctgctttacggcgttcgatttcatcatcaatctgctgcttatagcggtgcatagactttgtgaacgttgcgtatgcaatcccgttttcgtccgcgaactttttggctgtcatgccttttaattttgcgcgtcggaatttgataccaagttcaacccattcacccagctttcgcttcggtggcggttttggtttgtcttcttctgcgatgatctcgaactcaaaaataaaactcataattccctccgtttagggtatttattgccctttccatccgaacacacgtttcaacgtgtcctctgtgatgattttgaactcccagcccttttgttttgctgctgcattcgcggctttccatttgtcaatgtttaccgcataagtatacagcgcatcaacaaatttctttttgttgtgaacgttgttgttcgctggcttaggtgggggcaacgtttctttcatcggtttgacttcccaaaggtaggtcacaccgttatccatttcaacatagaaatccatgaagtagcgccgtcgctttccgtctgcgttgctgaaataagggatcacaacctcttcactgttccagcgtttcacatgcgggtttttatcaagccagttcataatatatttttcccagcttgaacgatacgttatctttcgcggatctcccttatatttctgtatgttctggggcataaaagaccccttgtatgtctgtcttccagccattttagatcctaaatatagtaaacattagataggggaaattacaatgttattttcgttctttccaccagttgattacaaaggcacaccaactactgatatctaccgcgattatcgtttttactttaaccgcgtgatcaggaattataagccgcgtacatatcaactgacaggttcattaagacccgaacaattagcggaaacgctatacggaaaccagcaatactactgggttatcctgatgcttaacgataattacgatccgttttacggatggattaccgatcaggaaacggcttatcaatgcgctatccagcgttattcaaaagcaggtggtgaacaggttctttatcatatggatggtaagggcaaccgttattacaatttggttgaagaccctacgaatcccggtcattggtatgacaaaggcgataagaacatgcgttatttgcagtaccagggaacattagtccctgtagatatttatgaagatgcggtgcttcaaaatgaagcaaaacgaaccatcaagattattaacccctctgatattcaatcgtttgtaagcgattatatcaaggaaatggaaaaggcaaacctatgaaatacggtggaaataaatactcccctttctttgagggggtggtcgaagaagtcgatgatcctcgtctactggggcgtgttcaggtgcgtgtattcggtgagcatccggcacagaaacaaaaatctgaaactatcggtattccagttgaggaattaccgtggatgatgcctattcaggatattcgcagcgccgctatttctggtgttggtttttccccgactggtatcacgcgcggtagtttcgttatcggttactggcgcgataaatggcaccaggacggcgttatactgggaacctttgctggtgagtaccgagagaagccggacacccagaaaggcttctgtgacccgtttggtgagtatcctcgctatgtaggtaacgatgtcaacgtactggctcgcggtggcgcagaggggcgcggttcttcgagcgtgattattcgtgatgctaacagttcgttagctgtcaatccagatgatcgcccacttgacgagatcccagaagataaccgtcctgatactggcgggttcactatcgaaaccatgcttaaacaggatgaaggtatccgcacaaaatggtatattgatagtgaaggttatccgactatcgggatcgggcatttgcttatcatggaaaaaacccgtgatactgcgaagattaacgccgcgatcagtaaagcagttggtcgagaagtaaccaatggaacgatcacagcagaagaagtttcaacgctgtttgctcaggatttggcaaaagtccggcaggggatcagcaacacttcaaacgttcgagaagtatacgtgacgttaaaccgtcctcgtcaaatggcaatcgaaaacatgtgcttccagatgggtgttggtggtgttgccaaatttactaatgctctggctgctatgaagcgtcaggactggcaaaccgcttacaacgaactgcgaaactcaacatgggctaaccagacaccaggacgttcttcacgcgtatctaaaatcgtgctgacgggcaacctcgaatcatacggtgttcaggttccagatccagaagggcgttcattgagtgctgcatacaatgctgttgtgttggctgcatcaaacccagaagatccttttgttcctggtgatactcgcgtaatgttcgaggaacctaaatccgcatacgctgctgaatatccatacaacatggtattcgaatcccgttctggacacattcaggaattcgacgatacaccaggctttgaacgttacaaccgtgttcacccagcaggatcatacgaagaaattcgccctgatggaacccgtgttgttaaaatcgttggtgatgattatcaaatcgtcatgcaaggccgtaaattaaacgtcaagggtaatttgcaggttgttatcgagggtgatgcgttcatttacaatatgggtaacgttcaacagaccgttgatggtaacgtgaccgagttcgtgcgcggtaacgtgaatcaaaccgttgaaggtgaatatgtggggctgattaaaggcaacgcagaattaaccgttgaaaaagatgcaaccgtaaacgtgaatcagaatttaatggctaacgttaaacagaatgcaaccgttgccgtaacagaagatgcaacaattaccgcaaaaaatgctctgattgatattgagcaagatttggatattggcgcacgtaatatcaacatgcgagcatcgaataatactttcattgattccggcgcactgactaagatcactggcggtactgtacaggtaggctaaacatgatcatggattatgaaaccatcattgatgggattatgcaaaactttcagcatccttgcgatgctgagatccccgctggatattacagacgcgttatctggcagggacacacagaaaattaccctgctgttggggtagaatgggcgaccgaaatcatcccgatcggaactcacctgtatacgagttcccctttcggacagaaaagcgatccgcttccggtggtgaactctccaaacgtacccacgaatccagacggaaccccaggggtttctactgacattctggttacgaagattggttattatttcgccagtcaagcggatattgatgcctatatcgcatctatcggggctactaagctcgcgggtaatgactggtacggggcggatctatcaaaagcgaatttgttcaagaaccctggcgaactcgcgatgtacaaggtggaaaactccggtggttacttgctgacttccggtccccgttgcgatccgcgaatccgacaggtatacaaccagactacaggcgcgtttaccagcattgattactactggaatggtaatcgtattgcgtacatgaaacacgacgaatcccccgcgcaccagtgcaaatatacagggatgtcagtaaacacgaacgcagataccagcattcctccggttcctccggctctcccgtcaacgtatggggcgctaccgagtgaagccagattgttttctgctcgctctggattgggctgtattccggcgaccgtggggttcccgtatacgaatatcagcgatgctatgctttccgcgtggaacgagactcgtaaaacgttcaagctggctttcgatatgctgacgggtacaattaaaaatggctctggtatcgcgacgatgtttgacgggctttcgatcgggatggaagaaatcacagcgggtgctctggcattgtcacagcaagcatggcaaaccgcaatgaaggtgttccggcagatcattagctctgcgtttaacatcgtgggtggggcatggagtctgatcaataacttcctcccgactgttgcgatcctgggtgttgcaatcaacatttacgatctggtgtttggtgatagttcggttcaatccctgaaagattctttccaggctctgattgattccggcgcacagacgtatgaaagcgtcataaacgcaatctacggggctataggcagttcttacaactacaccgttgaatatgtcaaggctggcgctcgcgaccttgtagacgcttgtagcgcgttatttgactggtgtttgactatgttccaaaacggttgcgttgctctggtggatttgtacgggcgtatgatgcagatctggtcaatgcctcccgaaacaccaaacccgctttggtctgctgtgctggctatccgtaacatcatgcgacagattaaacctcttgatgtgattctgggcggtaacttcccagggtttacagcaatggatctgtatcagcaagcacaagcgaaagtgaaagcgttcattgatgcatcctatgcgcagatctccgcattgtatgatcaggggcaagaactattcaacaccctgaaagcacagacacaggaaagggattcgattaaacgtaagttcgatcagtacctaaactggatgtgggaacctgtaacggaagcaacaaccgctgcttatcaggctgcacttgatgccgctaacgctgctgtgaatgcgactaaggccgcatatgagggaatcaaagcacagattgctactctgcaagatgggatgaaagacacctacagcatggcaatggctgaactcaagaaactgcctgtaatggctcagattaaccagttcttaggttactgtggggttgcattcgatgacctgttaaaaacgtatgagaacgcgctgacgggcgcacaatcgctatataaaaactttgttgacagttcccgctcgtttaaggacacatgcaaggtgatttataaccagatttgtacgcttgctctaagtaaggtaactcaatacgtaaacaaattattgtcattaatcggactcgcgatcacattcggttcaattagtgtttgcgtccctatggttcaatactaaatacccgataacgaggggtaataatggctactacaaagaaacaaattaatcagatccccgatatctttgtcggggctacttttgacgaaatcaaatctgacttaatcaactggctccgaggtcaggacgaattcaaggattatgatttctccggctcgcgcatgaacgtacttgtggatctgttatcatactgtacactgtacattcagcaaatgagtaacaccgcactgttcgaatcgtttattcgtaccgctgcattgcgtagttctgttgttcaacaggctcaggatttgggctatatgccggactcccgcaccgctgcaaatacttcgatcctgatcactgcgaaaaacccactgaacccaacatcgatccgtattccacgcggtacgaaattcatcggtacagtgaaagaaacaaacagtttcccgttcgtcgtatccgatgacgtggtgatcgttcgtgacaaaaacaataactatgtttcgatgttgaacatcgttcaggggcgtttagtacgtaccgaagtcatctttgatggttcgactatcctgatccgcgatccaaacatcgaccgtagccaggttcgcgttaccgtcaacggcgcacaatgggatgactggacaaacgaaagtatcgtaaacgcaacgggtgcatcaactgttttttatatgcgtgaaactgttgatggacataccgaagtttactttggtgaaggtgaaaccagccaacaggtcgctggtggtgctctgactgctgattacatcgggggcttgaaacctgcaaacggttcaaccgttgttattgaatatatttcaaccaacggcgaagaagcaaacggtgctgaaaactttgtttacgtggatacgttgacaaacattagcattacgaatattgttgagaacccgactaattcagcggactatgtaggcgctgatggtggtggtgaaccggaagatatcgaacgtattcgcgaactcgcgcctatcatgcgtgagacacagcgccgttgtgttactgcatcggattatgaatcgttcttgtctcaccgtttcggttctgttattcaggcggttcagtgctttactgataaagaaaaacctggctatgcgttcatcgcggttaaaccgaaatcagggttgcgcttgacatctgttcaaaaagaggacatgcaaaactatctggcgaagtataaccttgcgactattacgccgtcgatccttgacccgaactatctgtatatcgtacaaagcatcaaagtaacgtatgatatcagtaagttggttgaatcagaggaatggttgcgtggtcaagtaatcaacgaggttgacagatattatactgataacgttgaaattttcaacaaatcattcagtaagtccaaaatgttaacctatgttgataacgcggacgtgtcgatcattggttcttctgcgactattcagctattgcgtgaacttgataactattacagcgctccgatgtctggtattcacttcttaaaccaggtgaaatcgcgttctgttgtttcgaacgggttcaaatacacaaacgctgctggtgattcgtatgacgtgcgttatgcatcaaccgatatgaacaccacaaccggacgtgcaaaaattgttatcggaccattcaaaaacggtgatatcagtatcgcagcttatacaggaaccgattttgataaatatcctggagtgaccgatcgtaataaatattacgaagtcggctatgtggaacactacactgatttcattagtttcgatctgggtgtcctgaacgttccatccgatcgattcagcgctgcttatatcgaactgactggtacaccattggaagagaacattttcacccgtgatggttctctgattgtgtttgaaaacgatctccgtcctcaatatacaacattgacaatgaatccaatcagtcaataattttaacccctgtcacccggcaggggttttttgtttgctaaatatgggatataagtaacgcaaatttggagaaacataatgattaaagcgccgtcaattaccagtttgcgcgttgataaactggctgctaacttcgtttatttgaagtgggatagcgtcggcatggatttttactatgtcgtggaaatggcagaaactcgcggggcaggtggtgttactattccagatgaagatttaacctggttccagttgggttacgcttttttgaatgaatggttttcttccgatgtccagccaaacaatttttataaattccgcgtcatggttacgcacaagggctttgaaccgtctgattgggtttatacagatgaattatggacgttcagccttaacgcctacgcatattcaacaatgcgtgaatttacgccaagtgatgcattcataaacgaaaaattcgcaaaggacaatcagaactacgttaacttcaatacagatgtggtaatggcagcgttgatgaaagaagactttgtgttttctccactttacactgacgtatcccagatcagcgataaaattcttacacaagaaaactatcacgaaatccaggatcatattgaacacgtttgtaatgacattaacagaactttcctggtagcgtcaaacggtttattgtacctgtttgaacgttttcagaacatggcgaaggtgtcaaacgacaaagggcaaacatggcattactacaaggcgtttaacgaccgcgtaggaaaccctgtatcgcgctctgttgcgtaccaaagccgaaacacaacctatgtactgggttacgatcgtatcttctacgggcgcacctcaacggatattcgctggtctgcggacgatgtgcgattctctgctgatgatgttacgtttgccaaactggggaaccagactggccttgatttcgacgtagactcatacaacacgtttgctaaactgcctggtaacgtgtcgaaatatgcagaagcaatggcatgttccgatgactggctttatgtggttgcgaaaaacgttgtgcgtcgtatcgcgctgaaacagacaccgatcgacaccgatccgagttctccaacgttcggagaaaagattttcgatacagcaagctatacaattgtccctggaaatgataagatcgttgtcaagaaaatggatgtgatgaacgggattctttatgcactcgttacgggtgaagtgaaaaccgctctgcaagatcctacaaaacccgctaacgtggttccgtccgctgctgctggtgtgtatcaatggcaagaagacacgaaaacctttgtgcgcctgtacgggaacaccgagaaagaacgtttttatatccagcatgaatacaccaatatgtcaacgaacggcacggagatttttatttccgtagcgaactacaaatatccaggcacacttcccgatcctgaattgttgatcgagaaccctgcactggtcggtgctgtaaaatatgatttgcgtcctggttatactgccagccttgcgattaattttgcgacgattcgcgctcatatcgacgacccgactgtttggaaatttggtgcgcaggaatattacaacgaggcgaattatagctggttcttccgcgactctgtgcgcacatggatcactaatgataaccgtcctctggtggtgtatccgaaaatcacctacagccttgtaaccgatagtgctggtccttcgtcatcgcttcgtgtgaacaaagaggtatgggatcgcggacatgttacgatttacattaacaacattaagtttaccggattcacaaagtatacgaacggcgtgttgctgtataagagttcaggcgaaatcatcgggttctttgaactgagttaccgcgctcgcgataacttaacgattttctggaaaccagacaatacgttattgattgccgatcttattcagcaggaacgcgaaaaaccgtatcaaccggatctgtcacctggtttgattgacccagatttaagccatatgattacgcgctttgcgcctcaaagctatctggaacagcagtatttcgagaagttcggggaatactatttgcagttcgtttcgctgggtgaaaacacctactataacaagctgctgaacctgatcaggaacaaatatccgcgtgagaagaacagcgtagaatatctgtggtcggaagtaaaccgccgtaatatctacctggataaaacgaagcgtgatcaggtggttcgtttctttgaatctcgttgtagtgatttctattcaacgaaaggcatcgaagcaagctataaattcctgttcaaactgttgtataacgaagatgtaagtgtagaaatcgaaagttcgaacactctggaatatgatattctggttcattcaacaaatatcaaccaggacattgtaggccggacgatttacacaccaacagcgagagcaaacgtgacgtatatcgaacgccagtatgatgacggtcaattacgttggtcggtaacgctgcacaacgtgatcggtaacttccttgaagggcaggttgtcaagtctgaaaagactaacttcacaggtactattctgcgtggtgtgcgtggtaagcaaatggcgaacaactcgatcgactacttcaaccgtgggcgttcttactacgtgatgaaaattcgttcgaatctgccagcgtcccgttataaggatgacgttttacgattcgtgcatccggtaggctttggctttatcgggatcaccatgctaacggtgttcatcaactccggtttgtctatgacgcatagtgaaacgatcattgacattcttcgaaattatcgcttcgatagcggttatccgaagtattggcctgatcgcgtagcacgtctggacggtaacggaaaccagacatttgaccttgtaactggtgaagcattgtacgacccgcacccgaaagcgggacaaccgtttgatgttccgccacaatatgacattgatgaaaaaccgctgaatggtgtactgccgtccgcgcgtcgatttgatcaaagtcctctgttcgatagttcagcggttaaatactctcagttccgtaacttagtggaaaaacgattgaaagacgatgcgggtaatcctcgcgatccgaatccaccgactcagagaaaggtagcataatggctcaacaaaacatctaccgtgcggtcgtaactggtaagttccgcacggaaaacatgatgaactttcgcgaaatgatcggggacagccccgatcgtaactcgatttatatgtcaatcgggcgtaccgaacaatgggcggataacgaatccgaccctgaattcgctcccccttatccgaacgatgatacagatggtatcgttgatatgtggacgcatatgatcgggatgacgaaagtaccaggcgaaatgattgatgcaatcgttccgcgtaaagactggggcgatactcgatatccaaaccccaaaatcttttacattaatgacatcgtggttgtaaactccgcgccgtataaccgtactgactacggtaaaggatggatggtataccgcgttgtagacgttcctgatattggctcttgttcaatctccagtatcacgggtaaagttgaatgtgtgcgtattggtggcatttggacaccgacccacgaatcgatcgaacctccacgcggagaagcgaacggtatcgacatgggcgacggctatatctgggaatatctgtatacaattccaccagatgttgttatcaaccgctgtacaaatgaacatatcgttgttccgttccctgatgaacttgaagaagatccggttcgttggggttatgataacgtgatcaaatggtatcctgatatgtacgatttggtgtaccgaatgaaggttcactcaatgcgattccgcgcgtatatggattccctgttctttccgcaagcctctttacctggcaaccgtgggttccgtcaaatcagcgttattgtaaatccgctgttgaaaaaggcgcaaccatccgacccagaagtaaaagcaacggggcagtattacacgaaaggacagcttgaacttgactcaggacaaatgatctacatggaaaaccgtcaaccgattattcgttctcctgatcagaccgaagaagtcagtattattttcgaattctaaggaaaccataatggcatatcaaactggtaaaaaattaattgacgtggggcaaatcggcaacccgtcaactggcgacccgctgtatgacggcggtgttaaacttaacgaaatcatcaccaacgtatacaacgcgtttggtgatgtgcgtttactgactgcgaatgatggtgtgggtacaatgttactccacgcgaccggatatttccagaaattaccgcgaacctattattcaggaaacccgattgaactgggttcactgcatgatatggatacctctacagggccaattacggttgtgcttccatcgggtaaacccggcgaagggttctatttcataaatagtaacggtagtatttctgttgatcgtcctgttgtattccgtccgcaagttggtgatggtatcaaaggggttcaggatcaactttacgtgacctctccatatactcagattaaaatctggtgtgtgaagaaagaaggttccgttactacatgggattattctgttgaatcaatgtttggttcaaaaacaatgcctgtagatactactaaactcattctgaaagcatcaccgaccgcaattcctttatttggttatagtgaattcagtggggcgaaaattctcgtgtacgcggagaatatgacaggcacagtcaataaaatggctgaaattcttttgtctgttgaccgtgtcgctaagggcgtgtattcaactgaatacgcagttctcaaaaatagcgaagatgaaatgtacacgcttacgttcactgttggtgcgagtgatattgtttacgcaaacgtacaatccaaaaccgagaatcgcattaaattctcgattaaagcggttgacaccattaaatcagggatcgcagcatgaaacaagaaattcttatcggtaacgtggttgatgacggcgcaggtgattatctgcgtcgtggtggtcaaaagactaacgccaactttaccgagttatataataaactgggtgacgggagtatcccgcacccagcgggtgcgtggaaaacgcacacagcgcctacgctgacccctattttcggtgaatcatgggcgctgaataccagcaacaaccgtattacggtaaacctccctaaaggcagtgtaagcgattataacaaggttattcgcttacgtgacgtatggggtaagtgggcggtaaacaacgtccgtatcgtccctgcaagcggtgataccatcaaaggctcaccgacttacaaagaactgtacaaagacctgatggacgttgaacttgtttattgttctcctggacgttgggaatatgttgaaaacaaacaggttgacaaaatcacaacttcggatctggcaaccgttgcgaaagaaacgtatatcgcgactcagggacaaactgacttcctgaacgtgttcggccctggtaactcatacaacgtccgcgcactggaagtttactatcgcggtaacttgctgtacatcgacgataagaacgggtttaatacatcaaacagtgattacggctcgcctggtgcgagtgcaggacaactggtagatctggatggtgtaaacatccgtcttaaaaccccgtgtaacgctggtgacacgcttcaattcgttacctatctggatggtattgctgcatggcgagcgacgtatgaagcgcataccatgcgcgtatataacacgggtgacacagaacaggttagtatccctggtgaaatctgggttggcgatttatcaactaaacgcacgtttactaatgctgaatttgggatcagtccccgaattttgattaacccaaactcgttcgaactactgttgaacggtcgccagcttgttaaagcaggtgatgcggatctcccgacatttgtttgtgagggcgcagaaggttatgatgaaagtagctgtattgcgaactccggcgcatgggttccttctggacaggattacagtctgatttttgttaactccgtggttacgggcattaaatttgctcaacctctggaatcccgtgatgtggtaactattcgctggttcaacaatgatatcggtactgtcatggaatgggacggtgtaggcggtattaaagaacacaccgataagatttacctgaacaacgaagaagaagtgacgctggttaatcagatcgaatatactgattataacaacccaacgcagaaaacctcgcgtaaagtagcggatacatttagcggtcgtcttctggatctgcaagcgttctttgatgttattcacccaatcgggacaatctacgaaaacgcgcataatgatgctaacccaggcgattatatgggctttggtatctggacacgttacgcggaaggtatgttccttgcaggttggacaaccgatgcatcggatagcgattttggtctgaacaataacgatctggatggttccggtcaaccaactcacacttctggtggtactggtggcgaacgtggttatgaaattaaaccgatcaacgttccacaaattcagtcaaccgataaggtgttgattaaagatgacaacgggatcattattattggtggctgtcaggttgacccagatgcaacagggccaggttacactaaataccgcgaggatgtattaaaagtaaatcgggggaacactactccagataaactaaaaacgctcccgccttatattactgttcaccgctggataagggtagcataaatgactcagtttatttccaaaacaagggagggggcgaaagtcccttcccgcgaagcagactttttgcaatatgaaatgggtacgaaagaaccgctgattggtggtaaacgtactattggtggtgcaaacgtcgatcagcttcgaaaaggggtagattaccctaacgtacaatcagcaattgatgacctgtattctttgtctcagcagatcccgatcaatggggtaatcatgatgacggaagatagccccccttctgcggtgcaacaggtagaatcaattacgtttgatgggacggtttcaaacccagatccagatcaaacacaggcgactattcacgtttatggtttcccgttcgttttcgacaatacaacgaacgcctctaccgtatgcgagacagtctataacaaattcgttgaattcgtcaacgatgaaaaatatttcgatttggttactcgtaaaggtctcaacggggaaattctggaagttcgttttattgattcagttccgcatccggttactaataaaactgaatatggaatttcgatggtaggaacaatcgacgtacaggctaaatctggttacggtacgtggacaaagttaggtgaaattgaccttgctgttactccagcagttccgatttattatttcaagcgtattgcatgaggataacaaatgaacaatacaattaaccacgtaagcgataaatccgtttacgtgacatttgatcctgctggtacgcaatggcctagcacgtttaagaacgtacaacaggcattagccgctattgggccgtgggcgcgtactgatgttggattgcctaatgccgcgcctggtgtgcgcggtattgctgctattgcgacacaggcaatgattgacgcgggtactgacacacagacgattgtaactccggctttgctggcgtatcgtttgcaaaaccctcatgcatcacaaaccgtatggggttacactcgttacgcaactgatgtagaatcagtaacagtaacaaacgatctggtttctcttactccgcgctcgttgaactatgtgtttaacacccgtcaggcaaaagaaaacgtttggggttctgcgaaactgtcaacaactgctcaggcaacgtccggtactgatgacactaccgcaatgactccgcttaaagtgaaacaggcaatctctgctctggttccggtacagtcaaacgcaacagaaagttcgtttggtcttgttcagttagcaacagttgcagaagtccgcgcaggtactattcgcgatgggtttgcgatttcaccatacacgtttattcgtctgactgcaagcgaaagtgatttaggtttactccgtatcgctacccaggcagaagtaaacgcgggtactgataacaccaaagcgattaccccgcaaaaactcgctgctgtgaagggttccggctctactttcggtatggttaaattaacaacagatatcaataccggattagcgaatactgctttgtctgctggtgctaacgtagtaccgagcaacaaaaacagtgcaattactggtggtgcattgtatcagggttcaattactgctgacaataaataccagacaaagacagacgttgacgcaaatatcccgatcggatgtatgatgcttgcagcgtttaacgccgatgttggtaacttgtttatctgtaacgggcgagcgatgaaccgcaattcaaacccagaactgtttgcccgaattggttatacatacggcggttctggtgatattttcaacttgcctgatatgcgcggtcttgtagctcgcggctttgatggtgggcgtggtgtcgatacaggtcgcggttttggtacatatcaggctgatatgtttgcgtatcacgaacatgatctccagatgatttatcagaacggcggtaatcttcctaagagccaagcagtttatgaactgaaaagcgcggaaaaaaatgaccaacgtgttatgcacctgaataacgattacagcaaagcattaggtactggcggaaacgaaacgcgaatgaaaaaccttgcggtcaactacgtaattcgagtacgataaaggggttaatccatgatttcaaaacttaacccgttaccaaagatcccgtttgttgatggtgtccctgcggacaccacacaaacccagatcaattggattgttaacggcgaaactctcgatggtgcaaaaaccaaaaccactaacgagggttctttaaacagatgcggtgttctggttcaaaagaacgcggtacaattagaagcaaatacaactacccagacatcaaaaatcaacgaagttatcgatcaggttaacctcattactgaaaacctcgcggcgatctctgatgatagtgtgatcgacaaactggataaagttgtcgctgatgttgacgtgctgaaagtagatatgtctgctgtacaggcaactacagcaagcaacaccctgaaaattcaggatatcgaaaaggaaattggtgtatgggatgcgtcaaccgatcctaaacatcgtaccattcgaaaagatattattttcctgaaagatgaactgggtgcatatcctggctttaacgaagatggtgatgttgatccgtcctctactggctccggcgtgaaatacaaggtaatggctaacgctcaggcggtatctatccatgaagcacgtattactaagctggaagatgactgggtaaactcagatgtaggtaatttaaccgatgaagttaccgatctgcgtaacgaaatggggccgaagcatttagccactttcgaatctgtgtatgttcgtctgaatggtatcggtggcgatatcactggtattaataccgaactgtcaaacatcaacacttatatcgggcgtacaggctcaggtggttctggtagtattgattcccgcatggaaactgcggaaacgaacattactactctgcaaacccagatgaatgatccggttgttggggttctgcctcgcgtaatccttttggaaagcgctgttggtaactcacaggttccaggtagtatccgttacgatatcagcacaatgaaacgtagcattagcgatctgaatatgatcgttggtgaaacaagtgatgatggtctgcgcggtgaaatggcacaggttatgaccgatatcggtactgactctcagccaacaagcatcaaaggccgtctgctgaatgtggaaaacacacagcgcgacgaccaccaggcactggttgatattaccgcaattgtgggtaatacgtcaactggactcgttgcggctaatatcgcgatgggtaaagctgtttatggtgacgcaaccagttctgatccattcctcaaagatggtattcagaaaacggctcgcgataacaaaactgcgatcggcgttaatactacaggatcagaaacagggatttataaactgatttccgatctgactgcgcgtgttgctgctctcgaagctggcggtggtggtaacgttgaacaacgtctggactaactggaacagaataaagcctctcaccaggatgttactgatgctctggttccgtatatcacagaagttgaagcggataacaaatacgaagcgaagaaagttccactgtcatttactcaaaatctggtcggtcgtaacgattatatcgagggtgatgctatttctttatctgttaccgttacaggtggtaaactgccttatgtgtaccagtggaagaaaggaaccgcaaatatcgggactgattcaccgagtgtaattatccagaacaccacaacgagtgattccggcgtatataaagttgtcgtaaccgacgctgaaaataccgtgattacttctgatgaacttgacattgtggtacatacggttcctcagttcgatacaaacttgagtgatatttctgttgttgatggtgatccattgactctggaagtagtgtttagcggtggtaaaactccgtacacttacgtatggcataaagacggatctgtattgagtggtgaaactggttcttctatcgtcaagtctgctgcaaccagcgcagatgcgggtgattactatgtaaccgtaactgacgcgatgaacagtaccaacgattcagcaaccgcgactgtgactgtaacggtagcataattttaacaaggggcgcaagccccttttgaggatcatatgattacgaacaatccagaacagttaaaggatgaaattcttcgtcgtctgggcgcaccaatcatcaaaatcgaaatcacacaagatcagatttatgactgcattcaacgcgctttagacctgtatgcagaatatcattataacggcacaaacaaaacgtatctgattttgacactgggtgatgataacccgcgcaacgtgttcgacttgagcaaagaacacatcttcgcgatcacgaaggtattgcgtacaaacatgggttcattgaccacaatggacggtacagcggtttatccgtggtttaccgatttcctgatggggttgactggtggctctctgggtgggcgctgtgcatcgagtgtgtacggtatgaacgcatacggcgcggatatgggctactttacccagatgatgtcctatcaacgctcaatgcaagacctgctggccccactgcctgattactggttcaacgatgatactggtcagttctgcgcatgggggcaggtgaacaaaggtgacattatcgttattgaagcgatggttcgttccttcgttgatgtccctagctccgtaggaagcgtcgcaggatacgctacagcgggttctaacgcagtggaagaccaatccatagccgacatctacgaaaacccgtataacagcgttgtgggcggtgtacgagcgggacagggttcaactgttacgggcggaacgtctgcatataacaaccgatgggtaaaagactactctaccgcactggtgaaagagatcaacggacaaattctggctaaattccaggggatgcaattgcctggcggtgttgctcctgatggtacgcgactgatccaggaagcggaaaccaaactgcaaagtctgcgcgatgaactgatttctatgtctgacgcagtaccgatcattatggtgtagggggaataatgcaaaactgggatgaaagtttattcgctcagttgtctacgggggaaggggttgatcgcaacttaaaggatcaggtcactaacccgtatgtaaactggtacaaatacaacccgacacaacagctacacgattcactgacagcagaatcaatccagatgaaatcgcctgatatgtattacgtccggcgtgacttcgtgaatattgataagatcctgggcgaagaccgagaatccaaatttacgaagtcatggaaaattgctgcatatattgaatcgtatgccaactatgaaggacaacgagatttctttagtaaatttggtctgagttcaaacgatgaaatgacgctggtaattaaccctcgtttgttcgcacatcaaactgatggtggtattcctgttctgggggatctggtttattttcctatggacaatagcctgtttgaaattacgtgggtagaagccgatccgttctatcagttcggtgatcgtcctcagcgtaaaatcaacctggcgaaattcatctacactggtgaagaactggctcctgaattgcagcgaaatgaaggaatccatatcgaacctgatgcagaactggatctcgaaccgattcgaaatcttgacgggctggctgatatcaacattgaacagtacgaagaagacaaagaatttgaaagagaaggtgatgaattcatcgaatcttttgatgttgtcaacggacgcggttcaccgtttgcaagtctgccataaatacgttatatgggtataggcgaaagtctataccctcttcgaagaggattttatgatatacgcaaaacttaaagaatggttgcctcatgatctatacgttgagtatgttgatatcataaaggcttctccaaaaactgaacacacagaaaaacatcacatattaccacgttctttatttcctgaattcgaacacgaaccggaaaatttagtagaacttgatataatgaagcatttgatggcccacaggacattagcaaaaaccaatgatcctaaaatgattcttgcgttcttcatgatgttcacctatgaacacaaacgctattcatcgttatctgaacaagaacagcagttcattcttgaagaaaagacaaaggcgcgaaaggcaatgcgcattgttaaaaaagaacagatgaaaggcaaacatgacggtaaaaacaacccattttacgggaaaaaccataccgacgaattcagaaaaagaattggtgctgttcataaaggaaagaagctatcaccagaacatatagcaagtctcgttgctgctcacaaaggcaaaaaacgagaaaaggtacaatgcccccattgtgggataatgtgcgccgctaatacagcgaagcgctggcactttgataactgtaagtctggacgcgtccagcagggggattagaaaatttttggatactggtataatagctcactacgcaactacattgttcttatgggacaattgtttaaccatgttcaggttaaaagagtacgcggcgatcaagaaaaatacatcaaggttccgatcacctatgcatcgaaagagaagtttctcgcttccatgaacaaacttaactacacgttgagtcaggaaaacgttgctaaaacggaaacaattttaccgcgcatgaacttatcactggtggatctgcaatataacgcaatccgtaaaaccagtatcgcggtcaaccaaaaaatgacacagttagcaaccccacgaaaaacgatcacacagtttaaccctgtgccgtatcgtctgattttcgaactgggtgtgtatacgcgatatgaagatgatatgttccagatcgcagaacagattttgccatattttcaaccacacttcaactgtaagattaccgaactgcataagaacgatatcacagttgaccgagacatcaaaatcagtctccaatcggttgcgccggataccacattcgagggcgatgcaaatcaacgccgtcatgttgagtggtcatttatgtttgaattacagggttatctgtacccgcctgtaactgatgttaaaggcgaaatcagaaccgtttacacggatttcttcgctaacatgaacccgttagataaagataactttgaatccgtggatagtcaagccgatccggtagatttgcctatgcaggactacacgggcgaagaatatattcagacgtactcgcacgataagccgatcccgtctggtgatgaacctcctaagccgagggaatgagaatggatgaaaaattagatttgcagcaattgctgaatattgattccctccctggcggcgttgagtctggggaggatgtggttgtttacgaaaaacttgaactggttgacgttcaatcacatccagcagaccggaaaccggatctggaagaggattatacgctcgcgcgtaagactgcgcaccatatgaatcagatgatcatggatatggcgcagattgcattacacaacgcgaagaactccgaatcacctcgccacgtcgaggtattcacaagcctgatgaatcagttaaacgtttcaaacattggcctgatgaagattcacaaagaaatgcgtgagattacggaagagactacaaaaccaggcgctgaaaaaggcggtggtgatggtttgaatatcgagaatgcaaccgtatttgttggttcccctacggaactaatgcagaaatacggcagtgcatatgaacccaaagagggcttcattaatggtgaagctgtagaggtaaaccctgatggaaatggaaccgacgatcgatccgagtaaggaatcagatcaccctatcggattaatgcatcccaaatatctgaaaaagaaaattgatgaattggggatggagtggacacaaagcgaacacgataaaaaatggtatccgacaacgttcagtgactacctgaaaattaacggcattcaaaaggtcgatattcagtctaaggacagttcgaactttgccacgtacaaaaataaaggcaacaagaaaacccgatataacggcaacccaaacctgaaacgtgcgtatatccagactaaatggacgcaacaaatgttgatggagtgggtgaaatgtcgtgatgatatcgtttattttgctgaaacatattgtgcgatcacccacattgactatggtacaatcaaggttcagttgcgtgactatcagcgcgaaatgctgatcgaaatgcacaaaaaccgtatggttgcctgtaacctgtcgcgtcagttgggtaaaacaaccgttgttgcaatcttcctggctcacttcgtgtgtttcaacgaagataaatatgttggtgtgctggctcacaaagcctcaatgtctgcggaagttctggatcgtaccaaacaggcgatcgaactactgcctgacttcttgcagcctggtattgttgaatggaacaaaggttctattgaacttgacaacaaatgtaaaattggtgcgtttgcatcttctcccgatgcggtgcgtggtaactccttcgcgatgatctacatcgacgaatgcgcgtttatcccgaactttgttgatgcgtggttagcgattcaaccagtaatctcttctggtcgtaaatcgaaaatccttatcacaacgacacctaacgggcttaaccacttctatgatatctggaacgctgctatagaaggaaaatccggcttcgtgccttacacggcgatctggacatcggttaaagagcgattgtatacagacggcgacaacggtacatttgatgacggttattcgtggtctgcgaaaatgatcgctggctccagcaaagaggcattcttgcaggaacactgcgcggaattcatgggaaccagtggaaccctgatcgctggttggaagttgtcaaaactcacatggattgatattgatgaaacggaaacgaacttctatcagtataaacgtccagtagaggggcataaatatgttgcggtacttgatccagcggaaggtcgcggacaggattaccatgcaatgcatatcatcgacattacgacgatgccatttgaacaggttgcggtgtatcactcaaacaaaacgtcgcatcttattttgccggatatcctgttacgttatctgaatatgtataacgaggcatggatttacattgagctaaatagcacagggcattcagttgccaaatctctgttttccgaactggaatatgagaatgttatttgtgacagctacaacgatctgggtatgaaacagactaagcgatcaaaagctatgggatgttcgacgctgaaagacctgatcgagaaagataaattgatcataaataacaaaaagacaatactcgaatttcgtactttctcagaaaaaggcgtttcgtgggctgcggaagaaggatatcacgatgacctcgttatgtcgcttgcttgtttcggttggcttacaactcaaatgaaatttgccgaattctgcgagaaagacgatttaagactagccaatgaagtttttgcacgggaacgcgaacagctatacgaagacgcattatgtccggttatcgttacaagcggtgatgaaacgatttcggttggttctcacggtatttcgtttatataaattagaggaaattctataatggctttacaatctccaggtattgaaaccaaagaaacatcggtacaatctaccgttgttcgaaattcaactggtcgcgctgccattgtcggtaaattttcatgggggccagcttatcagatccgtcagatttctaacgaagtcgaaatggtaaactattttggttccccagacaacttgaccgctgactatttcatgagtgctgttaacttcttgcagtacggtaatgatctccgtgtggttcgcgttgtcgataaagatgccgctaaaaacgcaagcgcaattttcaaccagatcaaaacaactatcgcatcacagggttctaactacactgtaaacgatgtgattaaagtaaagtacaacaacgttgttgtagaagaaaacggtaaagtgtccaaagttgacagtaacggcaagatcctcgcggtaatcatcccaagcgaaaaaatcgttgcccgtgctaaacagattggtacttacccagatatttctactggctggactaccgaaattgtttctcagtcttccggtgtttccgcgtctattacgattgacggcatcgaaagcgattcagggatcactctgttgaacctggatattgcaaaagaaacaattcagggaaccgcattccagactcttacccagaaatatcagatcccgtctgtcgtggctctgtatcctggtgaactgggttcaactgttcaggtggagattatctccaaagctgcttacgattctggcgctatgatttcaggctacccttctggggtttccgttaagaacagcggtcgttctgtaatgacctacgggccacagaccgataaccagtacgcttttgttgtgcgtcgtggtggtattgtacaggaatccttcatcgtgtcaactgagaagaccgataaagatatctacggcgtaaacatcttcatggatgactttttcgctaacggtggctctcagtacgtttacggtacttccctgaactggcctaaaggcttctccggtatccttgagttcggcggtggtttgtcctcaaacgacactgtaggcgctgatgaactgatgactggttgggatatgttcgctgatcgtgaagcgctgcatgtacctctgctgattgctggtgcgtgtgctggtgaaactgtagagatcatgtctaccgtccagaaacacgttatctctatcggtgatgaacgtcaggattgtactgtgtttgtgtcgcctccgcgctctctgatggtgaatattccactggcaacagcggttgataacatcattgaatggcgtactggatataaactcagtggtggtactccggttgacaataacctgaacgtaagttcaagctatggcttcctggatggtaactataaatatcagtatgataaatacaatgacgtgaaccgttgggttccgctggcaggtgatatcgctggcctgtgtgtttacactgatagcgttgctcaaccgtggatgtctccagcaggttacaaccgtggtcagatccgcaactgtatcaaactggctatcgaaccgcgcacagcacatcgtgacgcaatgtatcaggttcagattaacccggtaactggtttcgcgggtggttccggcttcgttctgttcggtgataaaacactgactaacgtaccgagtccatttgaccgtatcaacgttcgtcgcttgttcaacatgatcaagaaagacatcggtgataacgcgaaatacaaactgtttgaaaacaacgacgatttcacccgttcttcgttccgtatggatacaggtcagtacatgactaatattcgtgcgctgggtggctgctacgattaccgtgtaatctgcgacaccacgaacaacacaccggacgtaatcgaccgtaacgagtttgtagcaacgatctacgtgaaaccgcctcgttctatcaactacatcactctgaacttcgtagcaacgtctacgggcgcagatttcgatgaactggtagggccgcaagccgtataacgtcaagggggctgaaaagcccccataaataatccgaggttaaaaatgcttactgacattttacgcgcctttgaatccggtgatttcgcacgtccgaacctgttcgaagtagagatcccgtatctgggcaaaaactttaaattcaagtgtaaagcggcaaccatgccagcggctacagttgaaaaagttccggtaggataccaaaaccgcaaaatcaacgttgctggtgaccgtacctatgatgactggacaatcacgatctataacgatgacgcgcataatacgcgtgacgctctggtagcatggtcaaacatgatgcacggaatgggcgatcagattagtggtgatattccagcgaactacaaaaaaaccgctacggtgaaacagaaaaaccgtaacgatgaaattaccgccgaacataccattcacggtcttttccctactaacgtaggcgaagttaccctggactgggacagcaacaacgaagtgtcaacctttgaggttactttcgcgctggactggtgggaataaaggctataaatacaggggtagcaatacccctatcattatttttcggagttactatgaactttttgggctttggcaatgtacttagctttttcaagaatttcgcccgtgaggacgaattagatcttgaacagcaattaaaaaatgatacaggttcggtcgcgcctcctaaaaataatgatggtgcttatgaaatcgaaactgatctgactaatcagaaatacgcaagcgtattccagcagttttattctggacaagatccggcgattcagaacaaagaacaattaatcaatacatatcgcggcatcatgtcttacccagaagtagaaaacgctgtttctgaaattattgacgatgcgatcgtgaatgaacagggcaaagatatcattactttggatcttgccaaaacagattttagtaaggcaatccaggacaaaatcgtagaagaatttgataacgttctaaatatctatgattttgataacatgggtgcgcgtctgttccgtgattggtatgtggattcccgtatctacttccataaaatcatgcataaagacgaaagcaaaggtatccgcgaactgcgtcaacttgatccgcgttcgatggaactgatccgcgaatctatcactgaaacccttgatggtggcgtgaaagtattccgtggttatcgcgaatttttcgtgtatagcgctcctaaaaatggctatacatacaacgggcagatctaccagcataaccagaaggttaaaatcccgcgctccgctatcgtgtatgcgcattctggactggaagattgcagtaacaacattatcggatatctgcaccgcgcagtcaagccagcaaaccaattgcgtttactggaagatgcgatggtcatttaccgtatcacccgcgcacctgaacgccgtgtattctacatcgacgtagggcagatgggcggtaacaaagcgacacagtacgtaaataacatcgcacaggggcttaaaaaccgcgttgtgtacgatgctaaaacgggtactgttaagaaccagcaaaacaacctgtcaatgacagaagattactggttaatgcgtcgtgacggtaaagctatcaccgaagtagacacgcttccaggcggtgctaacttctctgatatggatgatatcaaatggtttaaccgtaagctctatgaagcactgcgtgtgccattaagccgtatgcctcgcgatgatgggggtatgcaaattggtgggggtggtgaaatcacccgtgatgaactgaaattcagtaagtttatccgcacactgcaaattcagttcagccctgtgctttccgatccgttaaaaactaacctgatcgcgaaaaaaatcatcacagaggaagaatgggaagaaaacgttagtaaaatttccttcattttccagcaggattcatattacgcggaagtgaaagatattgagattatggaacgtcgcctaacgttgatgtcacaggttgaaggtgtagttgggaaatatgtctcccataaatacatcatgaaagagattcttcgaatgtctgatgaagacattgacgaacaagcgaagctgatcgaagaagaatccaaagaagaacggttcaaaaatcccgaagaggaagaggaaaacttttgatgaaagaatttatcgaagcaatcaaaagcggtgatctggtggaagcgaagaagcaattctattccatcatggaagaccgtaccgaagcccttcgccaagaaatgcgcgttgaactcgcggaagctgtacgcatcgaaggtgaaaccgacgatgacgacagcgatgacgatgacgacgacaaaggcggcgatgataaaggcgacgacaaagacaaaaagccgtctgataaaaaagacgacgataaagacgaataagaggtgtaaataatgcaactcgaactcgaagaaatcagcgtcgaagatctcgaaccccatttaaccgaagcgaaagcccgtgttgatgttctggggatcgatgacggcactgtgaagatcatcgaaaatttggcggtcaatgaacctcatttagccctggctatgatgtccattgtcgagggtttgagtttagatgaagtcattgttaaacacgtagattcgcgcggtaatgtggaacgtaaaaaagaccgtaaaacccgtgaacgtaatgcgtatcaaacaactggtttaactaaatctcaacgtcgccaaattgcgcgtcgtgcgctaaaaacaaaacgtgcaaacccttctattacaacccgcgcacagcgtaagcgtaaaaaagcgctccgtaaacgcgccgcattagggctataaatatgaatgaatcccaactcaatgaaaacggcgatatgctgctaatcgaggaatggggtttaccttgtgcggatatttccgattcaattttagaatcggtcggtgagtcgaaaaaagacggtaaacttcggattgaaggtattttcctccaggccgaaaaagttaaccgcaataagcgactgtatccgaaaaaagtattagaagaagcagtaaacgattatatcagaactcaggttaatacccgtcaagctctgggtgaaatgaatcacccgccgcgaccgaatgtcgatccgcgtaatgcttgcatcctaattgaaaaattatggtggaaaggtaatgacgtttggggtcgcgctgttgttgtcgaaggtgataacggtgatggggataaactcgcggcgttaattcgcgcaggttgggttccaggtgtttcttctcgcggactgggtaaactttccgattctggaaaaggttacggtatcgtacaagaagggtttaaattggcagtaggcgttgatgttgtttgggggccaagcgctccagatgcttacgttaagccgattaccgaatctcagtcaagcaaaccgcttgttgagaataatagtgctgatgatgacgctttcagaaaactctctgaacgtttgaaaagtctatataaataatatcatatcaaacaggaaacttagaaatgcttaaagaacaactgttggcagaagcccagaacctggataccccagttgagttagacagcattttcgaatcagttgaactttctgatgatgcgaaagcaaacttcaccactgtattcgaacaagctgtaaaagcaggtgctgcgaaactcgctgaaacccacatcgcccagatcgcggaactctccgatgaactggttgaagcccaggttgccgaaaaagctggcgaaatcgaaaataaactgtacgaagatgcgaataaatacttcgaccacatcgcgcaggaatggctctctgaaaacaaagaagctgtgtcccgtgatatcaaggccgatctgttcgaatctctggtaatgggaatgaaagaactgttcgttgaacacaacgtagttatcccagaagcgcaggttgatgttgttgcagaactcgaagatgaactgaccgagaatcagcaggaagttaaacgcctgttcgaagctaatcaggctcaggctaaagagatcgccaacatgaaacgcgataccatcgtttcagaaaaaacaaaagatctgactgaatcgcaaattgaaaaggttcagaacctgatcgaaggtttggaatattccgacaagttcgaatccaaactgaccgcaatcgttgaaatggtagcgactaaagcggaaaaacaggttgaagagagtaccactactcagacaaccactaaagatgactttgttccggtgaatgaaaatacacctccagcagagaaatcgaagatcaataaatatgtacaagcggctaaagccctttcctaatcttataaggtaagaaacaatgtctaagaaaaacgaattgatggaaaaatggaacgatcttctggaatctcaggaaggtttaccggatatcgctaccaaatccaaaaaacaactggttgcagcaattctggaaactcaggaaaaggatgctgatactgatccagtatatcgcgacgaaaaaatcattgaatccttcggcggtttcctggcggaagcagagatcgcgggtgaccacggttacgacgcaaccaacattgcctctggtaaatccagcggtgcaatcaccaacatcggccctgctgtaatcggtatggttcgccgtgcgattcctaacctgatcgcattcgacatttgcggtgttcagcctatgactggccctactggtcaggtgttcgcactccgtgctgtatacggtaaagatcctctggctggcggtactcctgcaaacgttcgtgaagcattccatccgatgttcgctccagacaccatgtattctggtgaaggtgcaaacaccgcgtttgctgctatcgcaactggtgttgctatcgcttccggcgctatcgttaagcacgtattccaggaaactggtgtcgcgtacttccagaacgtaacctccggcaacgtaaccgtaactggtgctgatgctgctgctctggatgctgctgtaatcgcagaaaacgagaaaggcactctggctgaaatttccgaaggtatggctaccagcgtagcagaactccaggaaaacttcaacggttccagcgctaacccgtggaacgaaatggctttccgtatcgacaaacaggttatcgaagctcgtagccgtcaactgaaagcacagtattccgttgaactggcacaggatcttcgtgctgtacacggtatggacgctgacgccgaactgtctgcaatcctggcaactgaaatcatgctggaaatcaaccgcgaaatcgttgacctgatcaactacaccgcgcagattggtaaaactggtttcacccagaccgtaggctctaaagctggtgcgtttgacttccaagaaccagtagatattcgcggcgctcgttgggctggtgaaagctataaagctctgctgattcagatcgacaaagaagcgaacgaaatcgcgcgtcaaactggtcgtggtgctggtaacttcatcatcgcttcccgtaacgtggtttccgctctggctcgtatcgacagcggcatcactccggcaggtcagggtctccagaaaactctgaacgtagacaccactaaagcggtattcgctggtgtactgggtggcacttacaaagtgtacatcgaccagtacgctcgccaggattacttcaccgtgggctacaagggtgataacgaaatggatgctggtatctactacgctccatacgttgcgctgactccgctgcgtggttctgatcctaagaacttccagccagtaatgggcttcaaaactcgttacggtatcggcatcaacccgtttgcgaactctcgctctcaggctccggcagatcgtatcacctctggtatgatcagcaaagaaatgtgcggtaaaaacgcatacttccgtaaggtctgggttaagggcttataagttgttgaaaaacaacgactttttaaagggaaccttcgggttccctttttgtttatataaataatgaaaactattgaggctatattatgaaacacatcatttataaaataacaaacactataaacaataggatctatatcggcgcacattcgactgatgatattaacgattcatacatgggttctggtaaagcaatcaaagcggcccaacgaaaatatggaattgataatttcgtaaaagagattttgttcgtgtttgatacaagcgaagaaatgtatgaaaaggaaagggagattgtaaatttggatttcgtcaatcgtcccgatgtgtacaatatgggcgtaggtggttctggtggtcctatgctgggaatgtttcattcagaagaaaagaaacatgaaatatccaaaagaactcgtgaaagaatgacaccagaagtaaaagaacacctttcaaaaataaaaacaggaaagaaacaatcggaagaatccaacaggaagcgttcagagactatcaaagctatgtataagggttctgcattcgacagaaccggatctaagctcacagacgcgcacaaggccaaaataagccgttctgtgtcgatagatggagttgtttatgcaagtggttctgatgctgctaaagcgttggggctttctcgatctggccttgattaccgtttaaagagtgacaaatttcctgaatggaaattcgttgcataaataaacaatatactccctataaattcaggaaccaaagaaatgagtgataaacactacacaattcacaagttgatgcgtcagtctgcgcttccgtctggtaaacgagaaaaagttatcaacgaagcaacaggcacgaccgacatcaacgtacagaacacgcgcccagaactggtttctttgactcgcgcggttaacaacctgatctatcatgaactggttgctgtacaagaaacagaactccctgttgcaacactgttcggtgttcgctatcgcaaccctaatggtgatatgactttctccagtgctgcaacctattcaggccgaatctctggacgtacagacatcgacgaaatcgatctgactaaagcctacgttaaaggtgatttgttcaagcatgatggtactgacgttgtttatgaggttatcgcaccgattaccctgaacactctggatactgacaaagacaccgcgatcatgaaagctgtgttccaaagcaaaattcgactggttagcgaagccgctgatacttctaagtatgaaaccagtgaagatatcgagtcaacctccttccagatggatcgctggaatattccggtacgctcgcgtaagtttaaaaccgaaatgacggttgaactgatgcaggatttggaagcgaaccagttcgaagctgatggggtgatcgaagacattctgggaaccgtggcaagtgaagaagtcaacaaagacattattcaaacactgatcaccgtttccaaacgttacaacgttgatggactcgttacggatggtatttttgacggtactaccgcatacaccgcgaaggatgctccagcattgggtcgtatcctgtaccaattagcgtgtgaaatggggcaggaaatgaatagaacgacttcatttgatgctacctacgtcctcgcaacagcgcgtgttgtaggcattctggctgcgtctggttggatgcacgaaaccgacgaacaacacccactggcaacaggtaagctgaacaacggttattatgtctatacagacacaaacagcccgttcgattatatgctgactggctgcaaatatgatctgggtgatatggatcacgtaggctctctgttcttcgctccgtataccgaagctgacgaagcaggttcaatcaaagtatccgtagatccggcatccctgcaaccaaaagttgctattctgatgcgttacggtctttccgtgaacccgtatactgctgaaagtgattctgatcgcctgatcaaaggtgatgattggtctgctcttgcaggtaaatctaagctgagtcagatcgtaggtattaaattacctaaactgggttaacaagttttgttttgagaagaccattatagtaataaagatctataaggtcaaacgagcgaagcgagttttcacgaacgaagtgagtgatgggtaagtacgatgtactgtttataatatttatattttatatatagagaaaacagtacatttccgtatactttttaaccaacattcactcactacgttcgttcatgtactcgcttcgctcgtagatttgacttcttgatctaactggttataatgttactttgttttgaggtgatacatggctgaactaaaacttgaagatctacaggctgaacttgaagaggatatgcgtattgatccgttgaagttacaaagcgaatcagcagacattccgaagatttggtcaaaatggcttcgataccattcgaatgctaagaaaaaacttattcaactccaggcgaagaaagaagcgattgtaaaagatcggttactgttctacactggtagacacgaaagcgaaatgaccgatgtcatttacactggttcgggtgaaatcaaaattgctatctccggtgatcctaagaccgttgaagttaacaagctgatccaatacttcgaactgattgcagagtttaccggaaaagcgctggatatcgttaagaacaaaggctactccatcaaaaacatgttggagatccgtaaacttgagagtggtgcataaaatggcagaagaatttgattgcaaatgcgttgtgtgcaaacaaccgatgaactcccgtaatacggcgtttgtcaatgaagctggtccgatctgcggtgtcgtatgtttgcaatatctcaacgaaaggaatgatcgcggtatcaatgaagccgacgatctgaacgaagttcaaatgttgctgtaggtgtgaatatgaaagactattcaaaaatcgactttaacgaagtatttcgtttgctgggattgatggaagaatgtgtgaccagggttcatgcacttcgaatttcgtttgaaagtggttgtatcgaagacgaacgcccagatttatagcagtaaatataattgtagggcaagggcatgtttaccgatggatgcattttcataatcggataaacctaatggcctatatggaatgcaacatatattcgtgattgggatttttttctcaacctggaacctttatgctaacagtgtgcaacggcacgaactacgattgactaccccgcaaatatacgattgcatgttgcggcgaatgtgtcacagtaccccttgtggggcatggctggctgattaatcagcttacgcagtttagaatagcggtgacgacaccgcgttaaaaatcaactatgcttcaaaattaaaaagccccttcctttcggttggggctttctttttaaaacttctcttcttctccggtttcaagttcggctttcagttcttctcgccgtcccttgatcgcgtcacgcattgaaatgtcatcggatgctgcaacctcgacttctttcacgcgggtgttgtaatacttttcaagttctttcaaaccttctagtgtccggcacgaagcaaccttattcatgaaatcatcaatcgctgcttcgtttacgaatgtagtaaaacttttcattttggcctcttaaatttctacctgtttgatcgcgtagtcgaatcgttcttcattgtagatccgcacacgttccatagcatgtttcataccgtagtttgtcgcactgtatttatttttggctgtcttagactttgacagcgtagccaggttatcaacgatatcccatacagtagcgagcgctttcgatccgtgcttacgaagtacacgaccgatagactgtttcaccacaacagcagatttgcaagggtgcgcaaaaatgatgtggtgtaggttcttgattgagatacccgtactcagtaccccgatcgaaccgatgacgattaaacctttcgtcgattctgcaattttcttcatttcgttacgatcgtcaatgtctgtatcaccattgaccaacaccacgttatcgtaaaccttgctcaactgctcgtacagccattttccgtgctctttgtaccggaacatcacaaaggcgttttcgttcttctcacgggctaatttgagcgctaattttagaatccacgcgttgcgccgtgtgtggctggttacgtacttgatttccgtctggtagtccgcacccttcaattttttgacctcttcttctttgtatcgaaggaagatcgtgttaattttcaggttggtgacttgtccatcatccatcaaacgacgcgtatcaactggtttaaagactttgccgaacgcaccgatgtattgcatcatgttcgttttcccttctttcagggaaccggataagcccagtttgaagatacattgatccatcgtgtcgataatctttttgatgctcatgcctgttgagaggtggcattcatcaaccatcaaacacatgaactgttggaaccattcggcaggcattttaaccgctgattgccaggtagaaacgtaaatcagtgcattactgtttttcgctgtaccggaacggatacccagcattgccgatttcgggaacaaacgatagtttgcgatgtcctcgatcatttggtcaacaagtgcggtagtcggaacgatgatcaacactttcccgctgtaatgttccagacaccaacgagagataagcccctgaatcagagatttacctgctgatgttggcaggttcagaacaccgcgacggtttttgataccgtggaacactgattcgcgttgataccagtacgggtcgatctgtttgtcgccgtcataaaccggatgttcgctaacccacttatcaaaatcttcttgcgtgatatcctcagtttcgtggatctttggatcaacccagattgaatacccgcgtgattctgcgaatttggataccagataggctaacccatacgggagtttcccgttgtagtccatcaagtaaatgtaaccgttccatccaccatatttgtatttggcctgatactgatagcctgggggctggaagctgaaatagtcacgcagttcatagacaatgtttggttctgcctgaatctgtacgtggcttgtgtttaaaaatttgacttcaatatccactatgattaccctatgtacaaagtatatacgtatttatgtcataaatattggataaacacttggagataccaatgaacattgattacgaaaaagttgatgggttccgtaccctcgacgcaaaagaacagaaaggcgctttagccgattacgctatgactgtgtttgcggttaagctgaacaaacaaaaatccttcgataacatgctggcggatctggttgctgctttaccggaagatgaagaaaaaccggaactgctgatcgattcccctgaaccggaaatcgttgcatataaaggtgaggtgactatgggtgaacctgtcatcgaagccccgaacgttcccgatgtggttattgatgcttctgcggattttatggagtacgttaaagaggtcgcgccggaagtagccgatcaaatccaattagtacctgatgtcgtagaagctcctgtaagcgcttctgacgagtccaaaggcgaactggtatggttggaagggtttagcccgacaatcttcatgatggggcgctctgcgagttctaacgggtattatacctgtccgtggtggatctatgactggattaaacaaaccccagactggtacaaagatcctgatagctgtccacatgcaagcgcaatcgacacaatcaaatcacttgcgttctatatcgtgcgcgatggtgaagttcgtgttcgcgaaaccagaaatagccgattcgaaacatttaagttttagcactttttgctaaaaaacttgttgacgcataccctcgtttaaagtatatttgtactcgaaggcgggggaatggctctcgcagtgaagaaggaaagcaaaatgaaaaacgaaatgatgaaaaacgcttattacccagttctgtttgtttggtctgatggtaaagtgaagaaagtagtcaattcaaatgctccttactatactgttgaagaagcactgcgccacgcttacgaagctgattatcctgtccctgctgaacctggttatgctcgttggaacggttcaaaatgggttgctgatacctgggacaactacgaagaagcaaaaatggaatgcgatcctgattatgtttctcgccaaatggaagcgcacatgattgcagaccgtcgcctggataacgaagctcgcggtttctattaaaattcaaagggggcgtagcccccttttttgtaggtaaaatatgactgaattaaatcacgaatgcctgaaagacttatcagaaggtaaagagatcggaaacgtcatcttccttgatatcgacggcgttctaaataatatgcggtgcatgaaatttggtgagcatatggacattgaatgtgctcgacacctgcgccggatcgtaaatcatgcgaactgtgatattgtcatttcctctacatggaggatcggcaacacaacccatactctacgggaaatcttctacccgtggggattgtatcgcatcattgggaaaacctgtacgaatctaacagaccgacaagctggacgcggtgatgaaatcaaagcatggatcgacaccttcggatgtaagaattaccttatccttgatgacgataccgatatgctgccggaacagagtgaacatttcatcaataccgatgggttcgtagggctgacagaagaacaatccacttacgcgatccgtaatgtgttcggtgtaacaaacccgttctgtcctgaatgcaacggctatgggcgcgtgaaccaatatgataaatgtccgtcttgtgacggcaaaattttacttctctaaatagagaaaaactaagaggttttgaaaatggctacagaaaaatggactacggtacacccgatcccgtggcgtaacaccagctttacctatctgccgtggtggatctttgatatcatcgtggctgcgaatgctgcaagcgaagactggcgtgattatgccgaagaaaaatacgcgaaagaattcgacacactgaaacaggcgtatattgattacaccgatgttgatttcatcgaatcccgtaacggttatctgtataagctgagtgattttactcctgctgaacctgtcgtaacaattacaccgaaaaccgctcctgctgatttcaaagtaggtgatgcggatctggctgcaactgatctgtttaccatcgatccttctggtacagcaatgactctgagtgttgactcttccggtcatggttctatcgttggtggtaaacttcatgcggttagtgaaggtgatgttgtcgtaacagcaacctctggatctgttactgcaactctgacggtaaacgttaaagcacaaccagtaactattaccgtataaactaagaaggtaaacaatgctgctatttgaattcaatgatgtattcgcaaaattcagcgatgcgatcgaagccaaatttggcaaacgtcctcaaaacatgacagatgcagaatatgaagctgctgtatcgtccctggttcgtacagatttctatgaaaaactggcgatcgaggtgttgggttgggatatgatgaaatggggcatgacctatcgcgatcgcgaagtcggttttattctcgtcaacgaagcaaaaagcccgtcctgggtgaatagtcaaaaaatcgcgtacatggataaagtatgcgcacagatgggtattgtacgtttagacttctggacttgtcgggatctgaacgaactgaaagcccacgcttaccgttgtcctctgatctcccgcaatgataagcatcgtcaagcatgggatagcgcagggaaatatcgtagtgttttcctgaacgacgatatgaacatcactattcaggatgtgaaccgctcctttgcggattacacaccataaacaaaaaagggaaccgcaatggttccctttcttttatgcaatttttctgatttctttcaatgcttcttctttgctaccaacgaagagaatcgctttacctccggcttttctgaatggcaacacagcttttgccctgtcatcaatcagtatacctttgtccgcatatgctgctttctctccgctgcttttggtgtagtggaattcaggcagataaccgaacaccttcatcaacgcttttcttttttgttctgctaccgcatcggaattgtatttccctacgctggttaagatcgcaacctgacctaaagttctcaaatgacagaacaggtcgatgccctcttgtaatggttccagattttcgtagaagtcagtttgtgatatagcctgtttcgcttttttcaattcttcttccggcattctcgccgggtcaccgtacatcggaacaaaagaaccttcccagttgaacagtacaccatccatatcgaacaaaaactttttcatatcaattcctcggtttgtgtgtgcatcatattcatatatgttcctattgtcaaccccatgtatcagttttcggtgcgtatgctgcaactttcgccactaactctttatcaagctgatcaatggatttctgcggctttccttttgccttaactttgatgtagttagacttaacgacaaacataccgcctttgtcagatttcttgatttcgctgtcaatgcctactttgttgaagctgatccagatatcgccgtccatgtactgtttcagagagtcgcccatattcaggatcttcgccatagtgagcgctgccccttcgtgggtatccatgaggatttctttaggcactacacgatcgcgtttaaggttctgctgcatagcaatatgaacatcgttcataacccaaacgatatggatgttttctttctgataacccagcgcttcaacatcacgggcgatacttgccagcttgctcatgcttttcagggttacgtcaaagatcaggtttggtttacggtcttccggtgctgctgtgataccagcgtacacacgcgcctggtttttgttggatacgttgaacacgtctgcgatcacatgatgcagtgttgctacgttgtccgggtttttcaggttcattgttttgacatcgtgaccagttttcgctttgatctctgctgccagtttggtactacccatgaccaattttttgagtgcgtcaacgtccagggtgatcccttcgatacctaacagcttttcgagggtgaaccctttaccagaacccgcgccgccagccaggatgactacctgaccaaatttaggataagccttaccgccgaaggtgatcagcgcttcatcaaggctcgtaaagtctttgaatgatttcatcttagaactccaggtgtttatttaaaagtatttattgacacggtttatgagtgtgtttatagtgcaattgttcgacggataggccggaagaactttaaccataaggtaacaattatgaaaaatgaactgcatgaattcatcaacgccgctgctcttggcgaccagtcaaaatataaatcccgtcgcgataccctgattgacgatttctgtaatctcttggggttcaagcgctggcataccccgtctatgcgtccagattgtgatccaaaatgggattacttcaaatggagtgatcgcgatcgtggttacgtcgataacgtccgcgtaatgtctttcaaccacttatacgcaaattcaacaattgctgttgctaaacgcaacgattcgacttatccgaacgggtggagtgttgctaaagtcatagaaacacttcttcaactgcgtcgcgaatataaatcagcataccgtgtcaatcccaatcctatctataatgaatggcaaatcgtcgcgaaatacctgctgaacatcacctattctattttctgtcgcttcgggacaaaagagattggatttggctctcatgatataattgcagaagcacgtcaccgcatgatccatgcaatcctgaaaattcaaaactctggtgggcttgttcttgctgcgttctgtgatgaaattgtttactacggagaacaggtcgaagttgatgatgttcatcacgaaaaattcaaaagatttgtattcgggcaatataacagctattcatatggaaacgatattcgtgtgatgaggcacccgcgcattatgttggatatggaagggtgggaaccaggtcacggaattggtgatgccgaaagccaacgtgaacgccgtgttcgttcagttgctaaaactcgcgaattgatgacaggtagccttactgattacctgttcagaacaaaagaagacgttgaaaaagaatttgttgacttgtctggagaatagcgataagctgtaatctctgaaaacaaggagataaccatgaataccattaactgccgcaaagagttcgttgagttctatcacggatcatgtactgctgccggaatcgaaagcatgttgttgcctccttgtgattctgatactctgtctgaaaaaggcagaaagaaaaatctggatcgtgttttcttcactgctgatatcgggctggctcgtatctatgctggaagggctgcacgttcaataggtggtgatccggtactgtatcgggttgtgtgtccggtagatgtggtatgcatgaacgatgacaaaggcgcaagcgtttatcatgctgcatgggctttctgtgaggaattatgaaagataaggtgttagcgtatctcgttttcttgctgggatatcgcgttgaagtgatgggtggttattcttctttgtatggggatttaaccgcgatctggatggttgcgttgggggttatgtttacctttatggcgatctgtattgcgaatgaggctgatcaaaatgcttgaattttatcctgctggttgcaagtcaaatccgcctgatgcatcgttccaatcctggatttattttcacagggaactaaacgacatcatcgaaagtcagtggaaagaccatcctgaacgaagtgcccccgatttagtcgatagcgtaacagatgtacgcaccctggaaaaagggctgtatgattgtctggttcagggaatgatgtgtaaattgattttgtggtatgctccgatcggttcagatctaactcgcaaaatcgcccgtggttatatcatgacgaaacgtgagtttgaccagatctggaacgaacccgactgtttcgaacgcgaaaaatacgaaaatgaggttagttgtatatgaaactatttcatgttgtgtatggtggaatgaaaaacatcgacatcgccgcgttatctgctgggatgctggacgaactcgaagcacagatcgggaaacgattcaaagccagtatcaccgaaacgcaaactttgtttgtcgatcaccctgcggatatggaaaaccttgtcaacactctggatgatctgatgatcccgtgtgctgatggttggaacgaagcatccggtgttaatgtagttgtaacttttgttcttaaaaatgttgacagcagaaatgccgaagtgttagagtttattcgtaaaattgattctactaaaggaaagtaactatgaaaatcgttcagcgtaatatcagcgaagttagccagcaggaaaaagtacagattcatttcaaattcaatgatctgaaactgggctatgcacagatcgcccgtgagcacatgctcgataacggcgacatttacgtgattgttcaggaaattgagcgaattcgtgctttccgcgcagaaaatccaaaagtgaaacatgctctgcgccgtgtgtacattaataaacatcgtgaagaacagcgtaagcctaagaccaaagctaaacgcgatccgcgtccagataacaaacgtaaagcaatcaacggcgctatggcgctggcattccaggaagcgggtttagcgtaagaggtttacatgaattcttcaatgatgaatcgctggtcgggcgtgataacttcgactatcaaaaaggatttggtgaaggttgaagcaaaaccaaagccagtagaaccggaatcactcgatcctgctgagttggaacaccgccgccgtgcaaagcaaattgaattcgatctgcgtgtcgctcgttcatacaacagtaaaaacgatgatgcgcgtaaccgcaaccttcaatttgctctgacgttaagcgactgggcgaagctaatgagtgaaccagtatgttcttactccggcagaccatttagcaacaaaggcggttgctctgactcccgaacaatggaacgaatcaacgcttctctgggatacacggttgaaaacacgatcgcagtaaccagcgccgcgaatagcgagaaatcaaatctcgatgcgtttatgaagggttctgtgatccttccagaagtaaaactgaaactgttacgcaaagctgcgtatcaaattgaaaaacaactgaaaatcaaaggttaaattatgtttgtgaaatattcttctctgactaaccattatgaaggtaaattcatcaatggtgtgatcatgaatggttttactggttgtgtgtgggttgcgcgtgaaaagatccacggggctaattttagcctgatcacttcggacggtatcaaagtcattccggcaaaacgtagcggtgaaattctccctgctgaacagttttacggttgtgaaccagtagttgcaaaatactctgaacctgttcgtaagctgtgggaaattctagcaaatacctgtgaatataaggaatatgctgatactggttctttggttgttcaggtatacggcgaatttgcggggcgtggtgttcagaaagatgttgactacggcgaaaaagatttctacgtatttgatatccgcgttaatggtcaattcctccctgataacgttgttgcaaattacgctgttgctgttggcctgaaaatggctccactgctggcatacggtacgtttgacgagatccgcgcattgcctatcacctttgattcggtggttaacctggcgaactccggtgcgatccctgcaaagaacggtgttgaacctgagttcaaaaacttcatgatgttgaaagatgatgaaggtgagaacatcgcagaaggtttcgtgatgaagcctgttcaacccgctttcatgccgaacggtgaacgtgttgcaatcaaatgcaaaacgacgaagttcaccgagaagaagaacaagcaagcgaaccgcttcaatgctccttctgaactgtcagaaacagacaaagtgaagctgaacgaattcacctgcttcctgactgaaaaccgtgtgaaaaacgtcctgtcaaaaattgacagcgcgaatatcaccgcgaaagatttcggtcgcgtgatggggctgacggtacaggatgcgctggaagaaatcgaacgtaactacggacctttcctggaacagttcgaaaatccaacgctggcgaagaaaaccttcactaacgaagcgtcaaatctggttcgtgagaactggggcgcaatcctgaacaatgaattttaaatctgttctcgaaaacgcaaaaacggctaccctgatcggtagccgtgaaccccctgaacgtatcgcgagtatagccataaagattggacgtgctttaagtgatcgggggatcttcgcttactctggtggtgctcctggaatggatagccatttcatgtttgactactcaccagaaagacggcgtataatcctccctgagaacggttttaacgggttgtattcgaatggtaaggatatcatcgactatacagaatacgacacgtacaaagccgctgacgaagcgagaaaggtagctggacacttcgacaaccaaaacgaatgggtacagcgccgatatgctcgcaattcaatgcaggtattaaccgaaaacctggacaaacctacagattttgttctattctgggcggtagagaaagatttttgtgttaaaggtggtactgcgatcgctgcaaggcttgccagattgtataaggttccaacgttcaatctttggaatcaaaacgttctggatgaagtctgcgatactttagggattaacactaaacctcctactctggattttctctggtgataactcccgaacaatcacgtaattacgaacgcctctcagttgaagaggcattaaaaaaggcgaaacataatggtagaaatcaatggaatcggtgtgaacgcacaggcgggaagcgggacacagtgggtcaaacgcgaaacgcaagatgatccccgctgtggacgtagcccgacactggcggaacgtgcgcgtaaacttgttgacgaaatcaacgcgaaaatggtcgaagcatcccgcaaagacatttccgagtatgtcctgaaatatccgactaaacaatcatatacctttgatatgaaacgttttatcggtaaggttatggatcaggaatgtaccgaaaaagcatatgcggatctgggtgaatggctggcggaagaagggtttactttcgatacacagcgcaaccgacaagctgcgttactcaataccttcgcgggttcgcgtcgtattaccaactttagcgatcctaagcgtgacggatatagcgatctgacttattacatcacctggtgaaaataattcgaaaaacttgttgacgggagttatgagtgtggtaatatagctcccgtagacaagacactaacctaaaaggaaaacatcatggaaatcaaattagtacctacttgcgctggctactgcttggcactgaatggtgtagcacacaacggtaaaggcttacgggctaacgttgaagcaatgctgaacgaactgggtgcggtttatgaatatgatgacgttgcaaccagcgttaaaatcataagccttgaaaaagatggtgttaactgtgcgggttggtgggattgctacatcgactatagcgacaaccgggtcttcttactgaccagcaactaaggatcgactatgtttggaatgaatgagtgttcagaagcggacgcgctagaagactgggctgactttgatgaccttgatctcgatgatgaagatggagaattcttctgtgttgggcgcggggttgaaagaacgaagcgtgaacttcgaagccgtttagcaatggggcttactgttggatctggaaagaaacagcaagttaaatattccgatggttctattcgaactgaaacggttgtcaaagaagtaaacgggcgtgtcattacgtccgagcggcagaaggacatcaaacaattgtacgatgttgcaaaagccgctaaagtaggaaccatgatcacttgtcctacgtgcaaacagttgcacaagaagacgacatatcataaggtgttctgctctaatggtaaaaaatccaggaaagactgtaagagtaaatactggaacacgatccatccagaacgtttggatcgtatcttttaaatcaaaacgtggagtacgtttaaatgaaaacttttaatgaactgaatagcctgatcacctcaactgattcctacaaagtgtcccactggttgcagtatccacaaggcactgatgcggcgatgttctatattgaatctcgcggtggtaagtttgatgaagtagtaaccgctggcgttaacttcgttgcgcgggttcttgccgaaccaattaccatgaaacaagttgagttggcacgggtactttaccgtaagcactttgggaaagagattttcaactacgaagggtggaagaagatcgcagaactgggttatgtccctgttactttccgtgcgatcccagaaggtacggttgttccggttaaaaatgccgttgcgactgtgtacgccgaacgtgaattctcatggttggctgggtggctggagacaatgacgattcgcggtatctggtatccgtcatctgtagcaacgctatcgcgtgagtgtaaaaaggttctggctcattaccttgatatgacttctgacctgactggtgaagcatataacatcacactgggtacacgtctgcatgatttcggggcgcgtggcgcgacctctgctgaatctgcgggtattggtgggctggcacacctctataacttcatcgggactgataccgttgaaggtatgattatggcaatcagtctgtttgcggactatcaaactctgtttgatgaagttgaaaacgtcgaagcaatcggtgtttcaattccggctcgcgaacattcgactacgatttcctacggtaaagagaacgaagacgaagcatataaaaacagcatcgaaatgttcggggatagtttctacgcttgtgtgtacgattcctgggactacaaaggcgctgtagatcgcattgctgaatataaagagcaaatcattgctgcgggtggtactctggttgttcgtcctgattccggtgatatgattgataacatcatgtacaccctgcgtaaactgggcgaaatcttcggatacaccgtaaacagcaaaggttacaaagttctgcataattcagttcgaatcatccagggcgacgagatccacgggcctgaaacaatcaaccgtgtgttaagttggatggaagcgaacaagtgggcgagtgagaacatcgcgttcggtatgggcggcggtttgctgcaagaagttacccgcgacactcaaaagtatgctgaaaaactgtgcgctatccgcgtgaatggtgtgtggaaaggcgtttacaaatgcccgaaaggttccgaatggaaacagagtaagaaaggtttgctgatgaccatcactaacggtgtggaattcaaaacaatcgacactctggaaactgagattcctgacgggtggcgtgatgcgatgattacgtattacgagaacggtgtattaaacacctccgatacagtaggggttatccgtgagcgagcaaggatttaatatccgcgccaacgataacggatcagtagtcttctacaacaatcagccccttgtcgctcgcaaggggcttttttgtaagttggtgggctacgggttcaagttggaacaggtggacaacgcgacactaaaagaggttgttcggattgcttatctgttgaaagataaaaaagatgaacaccgtgctattgcaatgcttgagaaattaggcgaaaatcattgcttcgtggtgaatcgtgggtataagtacgaaacgatcgccttatttgagaaaggacttggtgaattatgattaccacaatcaaagaaggggttgacctccatttaggcgactccgtaaagctgattaaacagcttgaatctggttctgttgacttgaccataacttcgcctccgtatgacaacttgcgccattataacggctctggtgatgtctggggtgaacacgtatggaaagagttgatatcggaactgtaccgcgttaccgctcccggtggtgtggttgtgtgggttgtgggtgacgcgactatcaacggtagtgaaacgggtacatctttccgtcaagccttgtacgcgatcgaacaaggttttcggttgcatgatacgatgatctatcacaaaaccgctctaccgaagaaccataaccgatacgaacaggactttgaatacatgttcgtgtggacaaaaggcgcaccaaaaacattcaacccgatccgcattccgtgtaagttccctgaaaaggaaaccgcacgacaaaacagctacttttccgaaaccaacgaaaagaaccgttcagcacgttccggtaagaaacgtaaacctgttggcaaggataaaattaagggtaatatctggtattacgctgtagggcgcaatcactcaacgaaggacgagattgcattcaaacacccagcaatatttcctgaacaactggcagaagatcacattaaaacgtggacggttgaaggggacttggttcttgatatattctctggttctggtacagtgatgaaaatgtcgatactaaccaacagacggttcaaaggcttcgaactgatggagaattattatcacgattctattcttcgtgttcagccatacgttaacaatctggaatcttttctatgagttatttgggtgttatcccctatacaggcaacaagcagtctctattacctgaactcttcaagttgttccccgaaagaagttcatacatgcgtttcattgattgtttttgcggtggccttagtgtgtcgttaaacgtccctaaacccgttctaagcaacgattacgataagacgcttattgatatgtatgagcgtcttaaaacgcttcctgacctgtctcctgtgcgagaattgattgcatcgaagggactggggaaagacaagaaagaagagtatctgaaattccgtgatgaatacaaccagaacaaagatccgttatggctctatgtcctgatcctgcattcattcagcaacgttaaccggacaaacgacaaaggcgacttcaacgctaatttcggatgccggacgctcaacgatgcaacagtaaaacgctttgaacatttcaaaaagaatgtgaaaggcattgagttttccagtggttcattccgtgacattgatatctgtgaaaatgatttcgtgtattgtgatccgccttacctgatcaccgatgcagtgtataacaagttctggaacgaagatcgcgaacgtgagttatatgctttcctggatgaactgcacagcgaaggaatcatgttcgggctgtccaatgtgactcaccacgccggaaaacaaaatgatatcctgattgaatggatgcagaaataccgcgttcataatctggataaaaagtatctgttaggccagcataccgactcttacgagcaaaacaaaacgcaagaagtctacgtgtgcaactaccagaaacgcgacgtaaatacattccctttaacactgaacgatttaatgtaggttaacatgtttaaaatttatggctatatcccttctgtgtataactgcgctccgtgcctgaactcaaagcgcttgctggacgcgaaaaaacatccgtatgagttcgtgtctgttgcggattccgtggaagacggtaaacctgtactgaacgaagcggtgatcgatgaactcgaagcgcttgttggtacgcgccggatgaccatgcctcagattttccatgacgggaaacacgtaggcgggttcgaccaacttcgtgagtacgtccgcaccctgtaataaataatgacaccttactgaatggtgttattatgctgacgaaacgaattaccaaaaaagactacccaactatcaagcaagctctctttaccgaacaagggggctgttgtgctatctgcaaacgtcccctggagggcgagatcgagaaacatcaccttgaccatgaccatgcgttagacggcgaaaacgccggacgtgtgcgcggcctactgtgtaacctatgcaacggtacagaaggtattgtgaagcacaaattcaacagatccggtctggtgtcccgtgatgtcgattacatccagtggttagagaacttgcttgcatatctgaaacaagactattccgaaaaccgtattcatgacaaattcataccagataaggtaaaatggttttcaagacttaccaaacctgatatgattgccgaaatggtttctatgggcttcgagtacgccgacaaagacgaacgcaaagccttaaccgcgaaatatagaaagcaattaatgaaggcaacgaaatgaaagtagaaaaacgcgacggtaaaaacgtcgatttcgataaagaaaaaatccgtattgctgtagaaaaagctggcggtactatgacggatgctgatgccgcaatcatgctggttcagtacaatcagatccgcgatggtagcgcaatgaagatcgcccgtatccaggaactcgttgaagaatccctgatgaaaacgaacccagcggtcgcccgtgcatacatcgaatatcgccacgatcgcgatattgcccgtgaacagaaaagtaagctgttcaaagatatctccggcatggtgaatctgtccaacaaagagatcaccaacgagaacgcgaacaaagacgcaagggtattcccgacacagcgcgatctgctggctggtatcgtagcgaaacacttcgcacgtaaccacattctgccaaaacacattgtagaagcgcatgattctggtgatatccattatcatgatctggattacagcccgttcacgccatacacaaactgctgtctggtggatttgaaaggtatgctggctaatggcttcaagatgggtaacgcagacatcgaacccccgaaatcaatcggtgttgcgactgctcttatggcacagatcaccgcacagattgcctctcaccagtacggcgggacaacctttgctaacgttgataaagtgctggctccatatgttcaaatgacatatgataagcactttaaagatgccaaaaagtatcaaatccctcgtgatgttcagtatgcaatagataaaactgaaaaggatgttttcgacgcgtttcagtcatatgaatacgaagtaaacaccctgcatactgcgaacggtcaaaccccgtttgttacaattacgttcggtactggtcaatcccgatgtgaacgcatgatccagaaagcgattctgaaaaaccgtattcgcggcctgggtaaagagggtatcactccggtattcccgaaactggttatgttcatggaaaaaggaatcaaccttgatccagaggatcgcaactatgacatcaaacaacttgccctggaatgtgcttctaaacgcatgtacccagatatcattagttcagctaacaaccgtgctattactggttctagcgttcctgtatctcctatgggttgtcgcagtttccttagcgtgtggcatgatgataacggtaatgaaattcttgatggacgtaataacctgggtgtggtgacaatcaacctcccgcgtattgctcttgaagcacaggaagcagacgacgcacacgaggctttttggcgtattcttgatgatcgtctgggtttgtgctttgaagccctgatgactcgaattgatagtctacgtggtgttaaagccagcgttgcgcctatcctgtacacagaaggtgcatttggtgtccgtctgaatcctgatgatgaaattctggaactgttcaaaaatgggcgtagttctatcagtctgggttatattggactgcacgaaacgctgttgatgtttggctcaggccagcatccattcgatcgtatcggctcccagaaattaggtcgattgatcattgaatatctccgcgctgcaaccgaagcatggaagaagaaaactggttttggattcagtctgtattcaaccccagcggaatcgctctgccatcgcttctgtaagctggactttgagaagttcggaagcgtcaaggggatcacggataaaggctggtacacaaacagtttccaccttgacgttgatcgcaaggtgacgccgttcgagaaaatcgactatgaagccgattatcattacatcgctactgctggtcatatcagttacgttgaatttcctgatatgaaaaacaatctgcaagccctggaaaaagtctgggattatgcgatggataaactggattacttcggaactaaccttccggtcgataagtgctttgtatgtggctctgatgacgagttcacgcctacagaagaaggtttccactgtaagcactgcggtaatcacgatccggctaaaatgaatgtaactcgtcgtacttgcggatatctgggcgctgctgaacgtccgatgaacaaaggtaaacaaaacgaaatcattcaccgtgtgaaacataactaagaacacctagtattagcgccttcaataaataaagaaaaattgagggcgctaatatgttttacacaatctacaaaataaccaacactatcaatgggcgtgaatatatcggcgctcataaaactgataatctcgatgatcgatacatgggttctggaaagaacatcaaacatgctattgatttctatggcattgaatctttcgtaaaggaaatattgtatgtttttgatacggaagaggaaatgtatctaaaagaagctgaactcgtaacagacgagtatatttcgcttcctcacacatacaacatcaaacccggtggtaaaggcggaacggcctacgaacaaagcgaagaacatcgacgcaaaaacagtaatgcgctaaaaggaagagaaatcactccattacatcgcgatcggatctcccgtgcattgaaaaatcatgtccgtagtgaagaacatcaacggaaactgagtgaagcatcaaagattgctgttagtacacccgaacataaagaaaagatgtctgctcattttacagaactgtataaatctcgtcctgaattgaaacagcaaatatcatcttctgtcaaagcacattatgctaatgaaacagaagaagagaaaaatcaacgtcgattgcgtcatacagggaaggttcggtcggaagaaaccaaacaaaaactatccattgctcataaaggaaaacatacaggagagaaaaatcctatgttcggcaaacctgcatcgaatcgccgtatggtttctggtgatggtgttgtgtatggttccgtcaaagaagctgcggaaacactggggttgtcgcaaggaacaatcgttgctcgatgcaaatcacagaaaaatgtaaattggttctatgtaggtgttgacttgccgaatcaaatcgattagtattttctacatcgaagcaaatcaatttgaaatcaaataaggtaaaattatgttcaagaaaatcgtagcattcgtgactggtaaagttgaaactgcaattgaacaaaacacttccccagaagaagcctggcgcagtgctgcacgtatcctgatcaaagagatcgaccgtctgcaacatactcgtgtttctgctgttcaggaaatcgtgaagttgaaaaagaaagtcaaagaacacaaagaccttcacactggcaaagagtcggagatcaaaaaacttctggcggcagggcaggaagtgtccaacagtcattacgtgctggcgctgcaacaccgtaacatctggcagggcttgcagacgaagatcgaagaactggaagggatgaacaaagagattgatctctctgtcgtcgaactggatcgcaaactggctgatgtcaaaatcaacctggagatcatcgaactgaacaagcaaaccgaaagtctgggtctgactgtaccggaagacgtgatcgccgctgtaggccacacctccgtaagcgtcgataccatcgtgacgaagattgatgtgttgctgggtggcaaaaatgccgcttccgtaacctccgctgacgttagcgcttacatcgactccctgaacgcgaaataagaggaaggggcgaaagccccttttttgctatgtatgattacactattgaacgtgatcgcggtgaagaatggttgatttctcgtaagagaaatttctatgttaaacttcctaaaaactttcatacgttaccgaatgatgatactgaccgcttattgaggattcttgtagatgggaatgttccacagcgcgtttttcaggaaatggttgatcatgcgtgttctgaatgggataaaaagtattgcgaagaactgacgcatgatagtatagtaaacagcaacctaaaagacgcttacgaacgaagaagtgtgtacgacatttacgaaaaagagaggaaaagtgaaatgatgttcgaagacggcaacagtgcattcaaaccagcacgtaaaacgtatccagactggcgcaaacagtacgcagaacagctatggcatattgacattcccgaagcgcttatgaaagcgattagccctgctgttgactactattcaggctggaaagatgaatatgagttagaagtcggatcttttaaggcgcacgtcattaaagcgaccagaatccttgatttcgttgaagcggttgcgtcgtgtgacatcgttgaagatattcgtattccatcaatcaacgtttcgcggtatagttctcctggtaacattcgcggggatcgttatgcgaacctggcaagcactacggataagctaaacttccacaaaatcaatgaaaaaggatttgatggttgtgttctgatctcaatggtggttgtcacaacacaaggcgaatacaagctgatcattgattgcgacaaagcaaaccgcgcagtacccacaatcaaacaatgttttggtgaagatttcaaagcattgatgaaagcccgtgcgatggaaaagttcatccattcgtgcaaaaagaacgtgctggagaagtatgatccggcgctcacatacaccaaaattgataaagatctggtaggtgatttatgctgattaacaaagcgcagtgtaaagcgataaactttcttctgcacgaactgattgaaaacggtatcagatttgaattcgttgatccgattaacggtgatgatcgtcatctgctccgctgggtgtctggtagcaatccgctggattcagtatcccaggttgtagagtctgcgcataacaatatgccttgtcgtgttctgttgggtagcgttaacgcctccacatggaatggatctgatgcttattatgtcggattcaaaaaagagttgacggacgacgaatgatgttataatatgcccctgtagacaacaaactataggggctaaatcatgaaaatcaaaaatactgctactgaaaatctttgtaacgaaatcgcggtgacttactggaaagaaggtcacgtaaaagcaatgaaggattttcaacagtggtgtgatacccagaagttagccaactgggaatacgccgtaatcgtggaacggatcaaagaactgatccttgagaagaaaggtactaaataaccatgtaaatcaacatggaatacttctcatgaactatcacagaatatacaattctctcatatcaaaatataggggagagttgcctttatcatttcgccatacaaaaactggctatgaaatacaccacatatacccaaaatctatgggtggttctaatgaaccagacaacttgatttatctcaccccaaagcaacactatacagcacatcatcttttatctaaaatgtatggcggtgcgatgcacaacgcattctggatcatgtcttgctccggcactgttccgatcacatccagacagtaccaaacggcaaaggataataaaatcaaacatcaaataggaaagaaacattctccagaaactatagagaagctcaaaaaatccaggcgaggaaggacatattccgaagaatcccgaaagaaaatgagtgaatctcagaaaggaaaaactcgtagtgaagaaaccaaagaaaaaacacggaatagttgtcttcgttcgatgtctggtagggtgaaagtagttataggaaccagtattgaatcaccggacgttacaataactctgcgcgggaaaactgatataaagaacaacggattcaatcaaggaaaggttcattcttgttgccgtggtgagataaaaagtcataaaggatatacatggagatttaaatgaattatattagaatttacaatatggatctggtaaacggtaaaggagtccgggttgttatgttcgttgcaggttgtaaccacaaatgcgatgggtgttataaccgtagttcgtggaatccccgcaacggtacaccatacaccgaagagactgaaaacgagttgattaaactcctttcaaatccccatgtggacgggttgacgcttacaggcggcgatccgttttaccgcaccaatcatccaacgctcttaaaactgcttgagcgcgtccgtgcgacgtttcctgataaagacgtgtgggtttggacgggatacaccctcgaagccttacagggcgatacagaacgctctaagctgttaccattcattgatgttctgatcgatggacggtacgaaaaggatcaaccgactaagaaaccgtttcgcggttcggataatcagcgaatgattgagttcaaaaagaattccatcgaaattaaaaatatcgcttgacctggttggtagttctgttaagatatccacatcgaaacaaacttgaggacgagaaaatgaaaaacgcaatcatcaaagaaatctgtgaactggttgatgtgtatggttggagtttaggcgctgcaaaagcagaagccaaatctcgtctgcaagttgtaatcaaagcccgtagcaaagatgaatttgttactaaattgcaagccctctatgagagataatatcatgattctgaatttcaaaacccgtaaagaagcccgcgactattgctggaagtggtcgatcccgctgaaaaacatcaccaaaggaagcggttcacatccgtggacggtgagaaccaaagaaacccgcttcgaaactggtaaagattacaagctggttgatgtcgaaggtttcactgacaacggcaaaaacattgcgaacagtgttcaatcaaaacagatccaccaattactgaacggtgttgtaaacatcgcaagccgtaacggtgatcgctataccttcaatgctccagcaggtgtcgctatgaacacccttcgtgcgtgggaagcgaaatacttcacagaagttgctccggctaaagccccagcgccaaaacgcgctaaaaagccaaaaccagtaggcaaaccgtctgttgctcctgcaccagctaaaccggatctggattctgaactggatggtggcgttaacctcgctccaacaacagaaccagttgcgaaacctgctgcaccacagccagcgcttgtagaagcgatgcctggttgttttgttgccgaccgtccgtatgttctggtagatgaaccaggtttcctgcgctctcacactgcgaacaaacgcattgtgcaacacatcaaaaacaacaacggtgttctggtgttttcgaatgttgacggcgacggtgacgcgacaatcacgcaagatcgtagcctcccgtttgtgatgcaccgtgagcgtaaattcttccgtgaactgggtactggtaatccggcaaacactccagcagttcaggcggttgatatttccaaacagcaacacgatcaactggtcatcgctgctgcacaggcagtagaagacgcactggcagaacaccagaaagcgatcgaagttgtagcgcagaaagctcgcgcagttcgcgaagccgccgcaaaacttgcactgctggcaaataagtaatataattcgggggtgcttacggcatcccctttttatttgaggtaatcatggaattattcgctggaaaaacttacggtttaaccgtatcccctgaaatctttgcagagaaaacctggaaaacaggtatcgcaaacatcattcgtgaaaaaggttacgtgacgattgatcgcacctcgatcggtgagttcgaagaccgcgcgtttatcatggacggtggttacgaatatgaactccctgcatcactatggaaatggttcaaggaagtaacgccggaagagggtgaattcaccccagaagaacccgaagaggttaatctcggtaacggggtcgagactgaaaatggtatgcgtatcgcaacgccggaagaggtttccgctggtgtcactggttcggatctgtgcctgatggatatccctaaattcacgtatcgccctgtacaggaaaatcctttgcgtgatctccgcatcgatccatcatttggggctaacctggaaacgttgagcatcgcaccgatgccagtacgtaaatctgatgcaatgcttcgtttcgccttgcaacatgttttcagtggtggtagcatctatcaaatcaacatggaatctgaactgaaaatgcaggaagaccagattgcaaacctgttcgatctgcacactcagttaaccgctgttgagaatatcgaaaaactgttaggcaaagagaaaaagcgtattttgcaggatctcaaaccatacggaaagaagaatgaaagtcgaaatctacggaattcccgaaagtcttcataactgttacgggtgtatacaagcacaaaagctgttgacagaaaaagggatagaatatacattttatcccgttctgaaagaagcgaaaaacgatctgggctttgaatacgatcgcccacgtatcgaagagttagcaaaacgggtaaggcaacgtagtttagcgtttcaatacccgcgtatttttgtcgataacaaacttatcggcggttatctgcaattgaaacaacttattggtgattaaatgagccgtgaaattttactccctgctgcaaatgctgttcatgctgaaacaatggaatacatggagaaattcgttgaacgcgataacaccgcgatcatcactcctactcacctggacgcgctcgaagatcgtcttcataagcagattaaagatcaattccctgaaaaggttagccgcaacttcattcgtcaggaaatcgttgcaatgatactgaaacattacggcgttgaaatcttcggtgtcgaaccactgaaaccgaagaaagcacgtcaaatgcctaaacagatcaccgacgaagcaatcaagaaataccagaagaaatacgctaagaataaatgatctttaatacgattgaatgtgttccgtcaagtggtaaaacaaaggcgattctgaaccatatcaatcaaacgggcgaaaaagcaatcatcgcatcgatttccatgatgttatcaaaacagtcttatgactactacatcaatcaggtaaaagggaaacgagcggtgattgtggacacggatcaccgaaccaaaagaaccaacaatgactcgctgcgtgaggttgtcaaagattatgatgtgatctttatcactcatgcagcactcaaaaacattgatgactttgatttgtataaggatttttccctgtacattgacgaagttcctgatttggttgcgttcgaaagtctgcgatttaatagcaatatcaagcacatacgcgagatttgcttgccgtttagttgcaatgccgatgatatcgttgatttaaaacttgacgaagaaaaacgagaactggttacacgattagcctatgatggtcttcgtaaacgtgatgatatcgcaatgaagatgttcccgctttaccgtgctctgttaggggctattccggtgaagatgcaatgtagcgattcgggatatgtctgttacttcgtagaggatcatgacgtaagccagtggaagttcaaaaatgtaaccattgcttcatccaacatcaaagacacaattacagggaagatcctacaaacgtttcatgatgtggagttcaaagattcaccgcttcaaaagctggttgactttaagcaatacaaaaacactgggcgcatacatatacatgtgctcgcagagggggattattcgcgttatactggcgatctctctcaatctgggacgacagtatacacccagattaaaaaacgcgtggaggcgcttttagggggcgaacagttcatctattgcactaacacatatagatcgaagtttagcgaggggcaggaaatcccgtataactcgcacggattgaacttctattcaagttatactaacgtggtggcattattcagttacaacccgttaccctggcttcgtcaaatgttgcgagcggttgcggtgtcctctggacttgaagaggaagaattagttgatgcttatgttgtcagtaaatattacgaaccagcctttcaattgtgcgctcgttctgatatcagacacaacaacagcaaacgaaagattaatttatttgtgcctgatatgcggttagcgaaatacatgaaggaaaaatattttcccgatgccattatcgaaaccacagaagcagttcaaacgaaaaggcaacgcaaatcatttcaaacccttttccaaatgacggacaaagagaaaaacgcttttacgccatacaagaaaagaaacaaattagattatgcgaatcctcttcatcacgcgattgttaaagattggctgaacaattaccgtgagaaaaaggcgacttgagggtcgccttttttgtttataaatatcagtattgaataagataaaggaaaacgataatggtagctaaatcattccgcgccacaagtggccttgatgctgctggcgaaaaagttatcaacgttggtaaagcatcacgctctgtgttgagcgacggcgtgaacgttgacttttttaacgaatttaacacgatccaacaatacgattctacccgtggttatgctgcgtttatggctatcatgtacgcgcgtcgtatttggtacgctcgcgcagatattccatcaccagcgggtgctttcgatgaaacaaaatggatctcaacccgtaacgatccaaaatgggtatataacaacgtaacgagcactgacggtctccctcttgaatccggtacgtacttaatggctgatggtcgtttctctgaactgacctatattctgccagatgcccctgttgagggtgatattatcaccattaaagacggtggcggtcttgcaggggttaacaacctgttagtacgttcaaacacccgtcagatccgtttacgtgatattcagtcaagctcttatcgactgactcacccatatataaccgttgcgtttatttttaacggcaacttatggcgtgttgctgaaatgcgtgataaccgtgattcgcagtttgttaatgcgactggtttaaccgctttccaaatgcaagcgggtatggtaacattccgtaacagtggaacgggtaaaattacgttgcagttgcctcgctacgcaaacgatggtgactcaatcacaacttacgatctggatcgccttgcttcggtgaacgttgcgactctgcaagtttatcctggtagcggacacacgatcagttatgacggtatcaataacgtaccctctgtgacttcacagcgttccggttatggtattttcatgttcgatcaggctaataaccgttgggttgtttatgacggtgatcagcgcgttcgtctgcgtcgtatcagtgatgacctgaacatgttgccgaacgattacgtgttcattactcctgttgctggtagtcctccaactgtgcgtaacgttacgctgactcttccgcaagatgttgctgaaggtgatcgcgtgtatatcagtatgtacatgatggggaaaacgcagaactgcacgatcaaagttaaagatggttccggtgaaaagatccgcaccaacaaaaacatgatgcagttcccacagcgtaaggattatccgcctaatgattggttcagtgttgacactctgactttcaatgccgatactgactatcttccatacatggaattgtcgtatctgaaagctacgaaagaatgggtagttgcacagtatcgcccgatcattgaacgtgtcgatccaacaaaccgttctcgtctgggtgtgattgcgctggctacacaggcagaagtaaacaagaaccatgaagatacgccgtctgatgaactggcagtaaccccgcgtacactggcgaataaaaccgctactgaaacgcgtcgtggtatcgctcgcctggcaacaactgcggaagttaaccagaacacgacagcaaccttccttgatgacgtgattgtgacgcctaaaaagctgaacgaacgatcagcaacagaagatcgtcgtggggtgctggaaatcgcaactcaggcagaaacaaacgctggtactgatgacactaccgcaatcacgcctaaaaagctcgacacacgccgcgcgaccgaaaccctagcaggtatcgggaaactcgttacaacgggcgctacgacagcggagggggctttacgtggggatgctggtacgaacgtctacaacttcaataacggtgttgatctgatcaccccgaaatcattgaacgagaagacggcgaccgaaaagtcaaaaggtctggttgttctggcgactgaaaacgaagtggtaactggtgctgctgcgggatctgcttcaatgccgatcgtagtaactcctgaaatgctgcatcgtaaaacgtctactgaaacgcgtatcggattgattgagatcgcaacccagacagaaacaaacacgggaactgatgatctccgtgctgtaacgcctaagaagctgaacgatcgtaaagcgactgaatcacttgatggtattattgccctcgctaccactgcggaagttgcagcaggtacggtaacgaataaggcggttgttccggttaagctgaaagagttcttcgacgttacaagtcatgttgcggttgctaccgatgacggtttaactcagtccggcactatctggacaacgattaacctggggattgcgtctgctactgaaacacagcgcggtactttacgtgttgcgactcagggtgaaactgatgcgggtcttctggataccgtgttcattacgcctaagaaactgcaagcgaagaaagcgacggataccgccgaaggtattattcgttgtgcgactaacgcggaagcgggtgcgggtactgctactaacctggcaattactccggctaccatgcagttcttgaacggtactgatccggcgtggggtgcgacgacaactcgacgcggtgcggtgtttatcactacccaatcaaacactttcatcggtgataatctggttggttctactcaggccgttgacgattatctcgaagatttctatgctgtatcgcctcgcggtctgaactttgctctgcaaaacttcttaccgaaaatggcaacggcacagaatagtttgagtctgggcggtgtggttgctgcaagctggatgcgtcgtgatgcaaaccagacggtaactggaaataacacgtttaacggtacaagcaacttcgttggtaacgtaaccactaacggaacactgacggctaacgctgcggtaacggttaacaacactgtaaccacgaacaataacattaatcagtctgcgaaagcaaacactgtttatgcaaatactgttctgagtggtgaggctgcgggaaccaaaaacttgcttcgtaccttccgtggtggtgtggcggatacgatctggcatgaaactgttcaggcaagcacgtatcgcctggcgacgggtacaacggatctggttgatgttctgacagtaggtgatgtcggtaacggcacaatggcgtattccggtacgaacattcgtctgaatgacaaatctctggctaacatcaacacggcgggtgatttgtttgttgcaagtacagcaacgcctacggtacaattacgaaccgctgcaactaatggttggaacggtgtaacaattagtaatgacggcggcacaaccactgcaaccgtgatcaacacccgaaactttacccagcatcttgacagtacctatgtcaacgtagcgggtgatactatgactggtgcgctgtcagttagcgtaaacggtacgggtggacgctttaccagtgtgagcggtacggcacatgttcaggcaggtgatttctctgggaacgtccagaaaatgcgcttaactggcattgacgataaggtattgactgagttcaacatcaatatcaccgattacaacaaagcgatgatcaacggaaacctgatctatcatgcgggtcgtaaaccgactccggcagaaatcggggcggtagcggtagcgggttcaaccgtcgatactctggttgtacgtgactatatcaaaatcggtaacgtgaaaatcttcgcaaatccagcaactaagacttgtgaatttgtgtgggaggaataatttaaatggcgaataacgaatttatggcgttattcggccctgatagtttcacggcgagtgtgttttcagaagcaaacgccgtgaaatatcgccttgttgtccgtggaacgaataacgattctgcggtcaactcggttgaggtatctatcaatggggctgatattattaaccgaaacgtacagcgcggtcgagggattaaccttgctgtaattgacggtacgagtttggctttgctggatttcaaaacttttgatatgtatggtgatcctactacgaatgggactgcgattagtgattacctatctacacttccagcaaacagaattgtgtgtttctatacgttcgatgctataaaatctaccgatgcgtttttgagttatatgcgcacaatcggatcggttgcatggcctgaaacacgattctttaacacgccgtcatcatcaacaaacaacccgcaacgttcatcctattcagcaatctattcatccacgatgaaaaagatctgtatggaaaacttcgtaggtggttctggtagtggactcaaagacaacacgacgagttttgttgaggttgtattcgatgaattcagtgatatcggggtgactggtattcctgaaagaatggttgatgatgttcaggtatatcagaacagcggcagtgcttacggcttccatttatacgggatgtgggatattggttctactgttttcttgggggacatcttcaagttcactggtgatgtttattgctcgcaagaacttcgcaatgctggcggcgaatgttatctctatatgtggacacagaacgcctctggtcaatggatatcctctgcgatcctgcgaacaactgggttagctcctgatgaatggcattctctgtcaggatatttcactatccctacggacgcactaaacgtgaagatgggctgtatggtatatcactacccgtctaccgtgaaagtggggcttgctcagtgtcgcaatgtccagatcagtaaagttccacgaatcgaaaccgatcgcaacggggcggctatcggtgtcaacggtattaggatgcaaacactttccgaagtcactgatgctggaaccgtaaacccgattgaacaattgctttctctgcctgtttcgcctgttggggttatcagtgacaagaaaattagttcgcataactttgctgaacttgattatattgtttctgatccgactgaatatacttctaccaatacagcggagtaccagttcaaagaatggactgctacccagcaagcggcggtaacgaaagcatcactaagcagttatggcttaaaagctggtgatacgatccgtatgcaatgccaaatgaaacgcgatgcaaacgcaatcgccaacaataaagatgcatatatcgtaatgcagttctgggacgcgaataataagtatatttcagggatccatatgcgtgatgttggtacgatcccgaacgtatattcattctataaaaacgaaggggttattcctgctggtgcggttacgtttgatttcggtttatatcgtcatccaaacaacacaaacatcggtacggtatccgctaaagacgttaaactgtcaatcgtgagataaaggggcgaaagcccctttttcataaatacagtcattacaggagaaatttttatggctgatttgaaattaggtacaacgctgggtggtgcgggtatctggagtgcttctaaccttcctctattgccctctggtggacaattaacgtataaaggctggagagtatacaccgaaaacgatcgtccgacagcggaggatataaacgcactatcgacgattaacggcggtactgttgcgaagaatactacgtttagtcaaaacgtgacagtaggcgttttgttgaccgcaaacaatattcaatctaaccagtgggtcaggatcactggaagtgctgttgctccggcagttgtttttcgtcgttctgatattacttcggttcctgatgtggaatctgggttgatggatattaacgcatacaacggtatttctggcggacagttagcgggtacaattaacgtgaacgctcgcacagacggaggtaataaaatatacatccgtgcctttaaaaatggtactcaaaatacgctgttgagtctggactcacaaacccaacaggtaacagttgaacagggttctttccgtgtgatcgggacttctaacctcggcgtgacgaacgctgcatcaatggcggttagcggtgcggtaactgcgaatacagtaaccccagcaaactgggctaatcatgatgaacgttatatcacgggtattcctcgcggtatgtctggaacaagtttcggggctgctgttgtaactgaaaagaacgatgttctgacagtaggcggtaacatcaccgacggtccatatggtaacactacgtattacgggcaggttgtcaactatcgccgtacattgaatagtggggtttcattagttcaaacatacttcgggaacgaaatgtggtttcgtcttggatcaggttctccgggtgcgtggtcatggaaccagggcgatgctaatggttggcggcgtgtttatgatacggtcagtccaccaactccggcagaagtgggggcagtaaacaaagctggcgataccatgagtggtgttttaaccctggctcctacttctcaaccgcttaaaacgcaaggaggcggtatttttgcgaatgacggaaacgtgtatatcaataaaatcggatttagtggatggattgatgatttgttcttgaaaaatacaggcggtactgtaacaggaacaattatccaggacggccttaactctggtgtttattgtatttctgcattgagtaccctagcaactggaacgaagaattaccttcgtcgtttccgtggtggttctggtgatgtgatttttcatgaaaccgcacaaagtaatacatggcgtattgcatcgggtagttctgattcacaagatgaaatggttctttctgctggtagctgggttcgatatcgtggagaggttgtttcgcaatcagcaaacggatttcgaatcgcatatggtaacaccggatcatttattcgcagtgacggaaacaacacgtatttcctactgacaaatagcggtgatgtttatggtggatataacaatttgcgtccgatttattacagcaacaccacgggtgctgttacaatgggacatacgttatccgttaatggtcgtattagtcaatctagtagttatattgacaatggaaatttaacattaaacggtagcggcaacggacgcgttgaatttattcgcagtggtgcaaaccctagcgatatgtatatcttccatgctggtgatgctactcgcggaaaccgtatagaactgtcggattcatcgtcgtatctggtttattttgaacgtcatccatctagcggcattcagttggtaatgaacggtaatggtagctttaacgatgtatatattcgttctgatgaaagactgaaaagtaatttcagtaagattgaaaatgcattggataaagttgatttacttgatggtatggtgtacgacaaagcaaatcacattgggggtgaagaaactacccgtgaggctggtttagtcgcacaacaactgcaagaagtattaccggaagctgttaagaaaggcgttgatggtgaacagaacgagatcttaactgtttctccgactgctgttattgcgttgttggttaacgcagtaaaagaactccgtgaggaagtcagggaacttaaatcccgctaattaaaagcccttcggggctttttctttttataaatatcataaaagcatttgaggatctaataatggcagatttaaaagcgggtactaccgttggcggtaatactatctggagtcaggcgaacttgcctttgctcccttctggaaacacaatcacatataaaggctttaaaatctacaccgaaaacgataagccaacaaaggcagaaatcggattaggcaacgtaacgaacgatgcacaggtgaagaaagctggcgacgatatgacaggcaacttgacgttaacgaacaatgcttcattaactcttcctcgtcgcattaaccttatttccgataattcatcggcggtgtatactgtagcaacgcgttcggataacaacgcagttacagatccgtttccgtcatcggaaactcgcgtatacagtttattagttaataccaaatcacatacaagcgatcctgcgggtggtgctactttagccgcacatctgtttaaccagaaagcatccggtgcgggtgtgatgtttatacaggtatttggtccacctaataagacaacaggcgcttctggatcggtgacagggcaactgttgatgaacggggaaaatggtcaactacaaatgactggttccggtttaacgatcaggatgcagaccgttgtcagtggtacgatctttggtacgcaaatgtctatcaagggcgattcgaaccgaaacctgtacttccaggatgctggcggtaatgagcttagtttgatctatgctgatacaggaaagaacttatatgttcgtactggtggtggtgcatatgcaaccagatttgcatctgatggaactttagttctcgctaaccatctacaagttccaggtaattctatatttactggggttggtcagtttaatggacgattagtagcaaataccgattatgcgagtatgagtgcgaacgttcctgttttaatggttggtactgttggtgatggtaacgcagttggcgacggaaatactcactttggatataaagattcgaacggaagatataaccatcatcttcgtggttctggttctacgttcatcaacacaaaattggggcttaacgtaaacgtcccatcgtattataacgacgttccacagggcacaccagcgcaatatttcttacctactgttggacagggcgggaaaaactatttgcgccagttccgaggcggtaatgcggatacgatctggcatgaaactgttcagggtggcgtatatcgactggcaacaggttcaactgacggacaggaagaattagcaatttctactgcgggttatgctcgattccgtcaagagatacagagtaatacttatggtactggcggacaattccgcgccgtaggaggaaactatggtttcatcattcgaaatgatggtggaagtacatatttcttacttactgcatccggcgatcagtatggaacatggagtggtctacgtccgtttactatcagtaactcgaatggcgttgtttctatagcaaacggtgcaaacatcaacggttctgttaactttggtaacgcggtaaacttcaacggcacggtcgaaacaaacggtcttggttgtggtactgcaaacggattgggtacgactggtatttctctgggtgataacgatacaggtttcaaacaggaaggtgacggtattctcaacgcctatgcaaatagccagcgtattatgcgatggactactggtgcaactgctaactataaacagttacaggttcagggtgttaacgggccagcattacttctgaataacacagagactaaccaatcatgttatttgctgattactttggcaggtaacaacggcgcatacttcgggtttggtggtgctgatgataacgtatcggtacacaactaccgactgaatacgaccttacagttgcgtacttcggatctgtatatgaaccgtggtctgtatgttgaaggtaacgtaaacgccaacgatgtgtatattcgttccgatattcgactgaaatctaatttggttgaattgaaagattcattaagcaagattgaacagcttaaaggttatatctacgataagcaatcaaaagatgctgatgatatcgtataccatcgcgaatccggtctgatagctcaggatgttgagaaggtattaccggaagcagtgcgcgaagacatcgacactggtatgttaaccatttcaccttcgggaattaacgcgcttctggttaacgcaatcaacgaactgcgtgaacgtctggaagcaatcgaaaacaaattaggggcttaattgcccctctttcatgaggtatttttatggctattgtaggagtccctggctggatcggttcgtctgcggtcacagaaacagggcaacgatggatgtctgctgcgggtaatgcggttcgaatcggaacaccgttttatatgtctcgaatggcgggacaatcggtatataacatcaactttacggtgtatgagcgttactataacaacgcccgttatcgtggtcagtggggggttggttggtattcaccatattcgaaaccttccggtcatgatgcggttggtggtagttttaacggcaacgcattcggtacttgtgtttctgcacaattcagcaatgagattagtgtaattactattcaaaatggccctgctgttaacctaagacttacgatggatgacggcggtgtgtttgactttgacaataacggtcgtatacaggatggatatcgccaatatcagattgcttctgcccaacataacgcgtggtatgactatttgaacgcccgtgtaggccaaacacgatccggtctggtcactcaacgttaagtaaattcctaaatatgttcggggtcggcatccccgaacttgaggattaaacatggcgctattacaagataaattggcggtgcttgaacgggtaatatcgttcatcatggcagtcaaaacatggaaacagctattcattaaattggttcttatcgtcactattttcattatgttcgtaacatggtacaagtgggatgacttattttcagtctggaaaacatcttcaagcgttatagacgtgccgacgatggagattgaaaaggcaaaaaagtttgaatccgtatccatcgaacagttaaacatagtgcatttaactacgggtgcggatttttcggcaatctttgggttcagacctaagaatgtcaattattttgttgatataattgcgtatgaagggaagttaccgcaacagattaacccgaaaaatctgggtggctatcctatagacaagacatcggaagagtataatagacatataaacgggctgtactatatctcagatattgcaagcccgtatcttccaacaaaagaccttgttccggtagcatatacctttagttgtccttacttcaatctcgaaaactactattcaggatcaattctaatggaatggtatatacagaagcccgaagtcgccgatacgaagttaatgatcgtgtgcaatcaggccgctagaattttaggcaggattcgatgataatttcagtttcaaactactcaaagcccgattgatgaaatcttttactttcgtcatcgggcttttatcgtatatgtcccatacgcgcatgagttcgtaaggtgtcggaacatattcatcgttccagtatccaacattacctatcgtaatgcgccggaaaccagcctctacgctgtgatatacaaagaacccagccttacccacaggggcgactttaaaaccgcgtgtagcggctttcatggcttcgtcgtgtgtcatgatagaatcacttcgcctctgtattgattgtgatagatgtatggacgaacacccagtgggtgattatctatgactaagatcaggtcaagttcgtcgtggttatcatcttctgcaactatatcccagtcggtcgctttctgttcttcaacactggcaatgaatacctggttaatctcaaccttacggtgagaacggcgaatgatcgtatccccttcgcggaacacgatcatatctgggttaatagggcggtacgcggttttacccgcgcacacttcattaagcatttcttcgtatgtcattataatacctttactcgctgaacgattgtctgtttaacttctttgtattcgttgtgaagtttaggtgtcgctttgaagcgaatcacatcaccctcttcaacaattttgttaccgtagtagataaccacgttaccatctacgttgattttggtcatgaaacgttccacttcggtgtaataagaaacttgggtatatccgagagaaatcactttctcaacaaccccgctcatttccatacgcttaccgatttccccgatgtgctgtgctgctgcgatcttcgcctggcgctctgcttcccattctgcgcggatctcttcacgtttagcgatgtaatccttctccagcgctacgcccatgcagtaagagcaaatagcctgaaatactgggctatcgttgccgttttctttgcactgatcagcccaccacagaatcgtatacatcggcatatcagcaatcacttcacctttacgcttaccgattggcatgatgccctgttccagcagttccaggttttcggtatcctgtacggacagtttaccgcgacgttcaaacagatcgaaatctgcgaagccctggaacaccatctggaaagtatcggtttggttcagacgatccaccatgcgatcgaagtattcacgcgctttcgcttccgctttatctgggtcagtagacaggttgcagatatagttatcagaagtgaatccacctccacgacgctctacacgcagagtgtacatagcgtttttagcgccagaagaaatgaagtatgtcgcggtaactttagtcaggttagtcatggtgaatctccttagtggtttcgtttcgacaaggccaatatagcaaaagccctcaaccgaagtcaagggcttttttatcatgcgttcgaatctttcataactttatgaagatggatatcaaaaattttccagtatgcttttccgcgaggataaatttttgctttatcaatgtcttcgttgcttccccatgtattgtttgggttacgacaacgattttttgcataatccatgtgccagaataagcgttgcaccgatgaatctgtgcctaatggatcttctttgctgaacagaatttgtgaactcataagaagaaacctgttcgaactactaaatcaatctgtttttccggtatcagtggcgctttatcgtcaacgttgcactgataatacatcccgacatactcatgaggaacgttggattcgctcgcccatttcaggttgtcatctgtacgcggccctaacatgaggttaacgatattgacagcgtgatcctgttctggggtattgttgcatccgttcacataatgtccgtgagcggttttgaggatttcaatgatatcttcgtcggcttcaacgagatacagccccgtgttttctgggatttcctcaagaataatcaaagcggttttcatcacacttacctttatgtttctgcttacgttttgcttctttaagtgctcgcttgcgatcgcggtgagtagaagcgcggttgaaatcatgtttcgctaccaggttgttcatcgaggatataatggcacatgatgttgaatactgacttcgccatacagttttacgatagttaagctatcagatcctttaacaattctgtatttttctggaacaacgcggtcgatttcttttttgacaaagttaagcaatccgaagtcatctatatcttttggtgctttggaaatagaagacagtgatactcgttgacgtgaatcatagtacgaagaaattacaaacatatattattttccttattggggcttttcagccccattttagataattaatccagcagtttgcggattttatccgcgatacgtccggcgcgggatgcactttcgcggtgatccgcttctttgttacccagttcagccagtttgcgctgatgttcttcttccgctgctttgcggtctgctgctacctgtgcgacctgttcgttatcgtgagcaatacgcgcttcgagttcggtcagggttttgtcaaaagttgctacgatttcgtctacagaacggattttggaaaacagtttcatattcattatctcaattagtatggttggaattcaaagtcaaacagatcatttagtgcgcggttgtattcagtatagttctcaccatccccgaaccgcatctgaatcgcgctttccgctattgtaccagtaagatttgagaaaccaaagaggtttttaatcttatcgtgtgcaacgaagtacagagaagcactatccagcaaggccaccatcgctgatggttcatgttcgcggcgtttgatacgtaacagagtacggtttgcgccagtcttacggcgttgatttggggctacgtagaatcggaatactaccttacccgttttatcatcaactaccaggtagaagccgtgttctttcaggtcaaccccttcgaacttggtgaagtcaccgcgcttcatgtcacctatcttaacagcatatttgtggatgtcaagccttgtcagaattcttttcatttttcttcaccagtttatttcctaatttggtgtttacaccagttttcatattcattgtcagtaccagcaagaagatagggcatgacaaaatcaagatcgttgcgccgaacactaagcgaactaagcgaatcaacaacgtcccgatccatttcatcggtatctctacccacttctgaaccgttgcgagtaccagcataacataacccagattaaatgcaagggctgttgcgataataccgtaaggttttttgaagtatgtctgttctccgtcttctgtacgtccagcggtaacgttgcctccgttccagatttctttagcggttttgatggctgtttctgccccgctcaagttctgccagtagtcaggaatgctctgtaggaatttcataatcaaatcctccgcgcctgaatcgctccaggcgctgttttggggttagtagtgactgaatcccacagttacatcacgcatcacctgataacggcatacacgcatcttagcgttatcgtaatctgtcgggattgctacaacatcgcgaggattaaccttaacctgaatgactcgcccacgtcctccgccatagtgaggcaggtacgattttgcggcaacatgcaaaccacatgaacaggttcggtttttattctcgtctacctggttacgtggcatttcaaccacaacaccaggggagttatcaaacttaccggaagccagatcgcggaagtcttcacgaacacgtttccacgcgtagaaatctccgtcatctgccagttcgatatcgttatgtaccatgaacccataaagctgatatacagcatcgcgagaagggttttccatcaacttctcaaagaagttaaccaggtgctcgtaagggcgatcgttgtacatttcgcgaacgatacgttgcgtgataccgctgtcaaacacaatatctttgtacaggactttatgcccgatgattttaatgttgcctttgctgtaaatcttcaacgcttgcgttgtgtccaacagggtagcaactccctcaatgtcgcccttaaccattaaagcatgtgctttttcgaagttagggtgtgacgaatccgctgtgatgatcttgccgtccagtaccagagtaatgaacgattcagaaccaatcattttagatttgacatctgtttgcggaagtggtttcgatgcttccgtattatacttagcgtgttgctcggtaataacgcgcccgatggttcggacgcttacaccaaattgtttagccagtgcggttttgtttgcgctggtcagaaagccctcataaactgctttcttttgtacatcatcaaggatcttaacgtttctcattatttccaccgtataagtttgaccaaatccatcacaattttatcatcattaaacatactgcggaatgtagaataagatgaatgtaacaacatgtaatgaattgatgggttgcgttctgcaaataaatcgtaagcagtatcaacgcgttctttcatatctttccgcattttgtaatacttcgttgacatttcacgaagtaacaggttacgcaccacagtttttgatttgtttttgccctcgataacatcataggtaaacttaccatcaagataatcgagcaacagatacaattctggattatagcggtttttaaccatgcgatcaagggttacgcccatagaatcgcgcagggttcggatctcgcttccgtggtttgatgaaatccatgcagggaaccagttaggttttatcttcttcgctgcgtccgcaaaacgttttaccagataatcatcaaggcatttcatgttgctatctggaatgcgactccacagagagtttcgcagaaccatcacttcgttcagccctgtaaccgttaacatggtcatcatactgctggcgatgctacccaacgaatagttctgtgcttctccgtccagtcggctatattcatcaaccccataaaggcgcatagcgtacatttcatccagtttcacaaactgtgctttagtcaggtacagatcgtttttctgtaagttgccctgatcatccaggaagtaatgatatgctgtaggcgtttttggacgcggttctgaatcaccagaagatgattcacgcgttgctttccagcgcttgcgatcttcggtatacgtttcgaattctttagtcatttcactggttttcagtgtaacgatctcagattcatcgaaatacccagttctgatcaagtcctgaacaggttcactattaatctctttggttacgaaactgatacgttccgaaccattcaacatgcagtaaccgatcagatatgggcggagtgaacgcgcttcattatcgttttcaacaatgaacagtttcttctgtcgccacggttgaatcatgcgcataacgtcctggcgtttggtagtttccgctttgtatgtctcgtgacggcgaccagaacccacacgttcaaatacgcaatctttcccgtcatatgggttagcccagaaaccacggatatattttccggttgcagtttcactacttttaagatgcgtcagaatttcagccaacgattctttacccacacggaaacgattatcacgggttacgaacccctgcaacaaaccaggcagattattaaaccatacgagtttatcgcgggttgtcttctgctttttatactgttccatcaactcttcatcaaagcgtttgttgattttgtccagtcgatccgtaatcactttcttcgtgactttatcaaggctcaactcttcacgcgacggcatgaagtccagcgatcccagagggaaatccagaatatacgcgtaattgctgttacggtagcagtagaacagcgagttttcgaacatgtccatgtcgattggatagcaaatgttacccatacgcgcgtatacgcctgaatagttgatagacttataacggatgatcccgcgatcgtctgcttctttcggttgccagtttacatcaacctgaacaccgataaagcgcggacggatacccgtaaacggttcataaacacgcgccgcttcacgttcccattctgcgatatcttcgactttaaccggaacggtgatttgaacgccgttaggttcgtctgtttcggtttcgtagatttggtcaacgaaaggttcaccattatccatataagccgtgtacgcacgtttaacgccgtcctggatggattcgatagtgaatgtttcggtgtagcagaacggggatttactacccagtcccagcgccccgatcagttcgtcggtgtcggttttggtggattcgaaataggttgcaaacacctctttaaccatccagtcacttaaccctgtgccgtaatcacggacgatgaaacgcggatcgagaacagttggtaactgaacatcgaacgggttcatgttacccgctaccatatgaccatcaatggcgttactggagatttcgcgaatgattgcgcggatcttgtatttgtaaatggttgatgacatgattttgtatgttttcgcactggtagccattttaaacttcgtgcgttcgcctttatcgaagcccgtagtgtgaatggtttgtggtgctaactgacgcaatttcattgtttatatctcacttggtgttaaagatgatgttatcgcatgaatatttcacaggcttttgatcaagcccatattcaacaggtgtacacatccggtcaaggtattcgtaaacctgttgcttctgacgttcgcggtctttcatatccatgataccgaccacgatagcagttacaaaacatattgcaatagtacacagcacagctattgtaatatattttcccgtttttggtgcatcatatggtttcattgaatcgcctctgcatattgttctggtgtcaatttacgcgctactaagcgccctttggttgctcttttgtttcctgaaatgtagatgttcgcaaggttgcgtttaccttcctggatctcattgtacatcttttcaggcatattgcactgataaacttcgccgttcggagttttcaggaacaaagcatacatatcctttttgctttcccgaatcactgatttctcacggatacggcttttacatggtgtaggctgtgcgcccaactcgatagctttacgctgccatacgatcccgtgtccagccccttcggtcagagcatgtgcaatttcgtgcatgagagtatctaaaacgttctcgtagatatcttccttaacgtgagaacggcttaattcaattgacttgcgactgtaattgcattgtcccagagtacgcttgaaacgtccgttaattttgaaagaccaatgagataagccatgcttcgccatgatgcttttggcccagatggttatttccatatcgctacgagttttgaacattttatatcctccccaatcagtgaggacactatagcaaaaaagcctcccgcgatgcaagaggctttttgtaaattatttcaatttcttcgaaagttctttcaaatcattgagatattcagttttcggggttgtttcttcccagtatttcagttgcttacgcagttcgttcgcttcgtcttccagcttttgacgttcatccgtggttagatgatagatgttcatcgcaaccaggatttcggcgtggttctcgcaacccgtccacgtagagacaagtttaaccgcttcgctgcgactaagccccttcaatgcgtcaggctgtgcgatcatctggtcaatgaagtccaccttcgccagcgccttatctaacgcttccttagtctcctggatgcgcttatcaatacgctgttggtaaacaccaatacggatatcaacgaagtctttcagcaacgtttcaggacgctcgtatgaatgcagtttcccgttaaagataacgttgatgttcgggtttgagttctcaatcaatccgaaatctttcaggatcttctcacgggtaagcccgtttgcgtactcacgtttaagggtgatttcgtagcggaaatcttctttcgatagatccttatagcttacgatataccctttttcttccagcttatccagaatagagatatatttcacgcgatcatacttgaccggaatctctgtgatcaccagtttggttttaccctggagttcgtacttgccgtacatcgtaccgttttcaatgtcgcctttgaaatgcgggtatttcagatccagcgtgaaatctttcccgttcaggtaactaacacatccattcagaaccgaaatcggatcgtgtggtggaatgttggtagcgtatgctttcgcgatcccgctgaacccgttaaccagtaccatcggaatgattggcaggtaataggctggcggtacgtgttcaggatcttcatgcgggattgttaaatcttcatccatgtagatagccttgaacagcggagacagcttacatttaatgtaacgcggtgcgcctggctttttaaccagacgggaaccaaagaacccatcgcggtcaaaaagcgggatgttattgcaccagtgcgccgccataagagacaatgcctcttcaacggatgtttccccgtggtgataaccatacattgcaacaccgccagcgatagaggctactttctggaagcctgtaccgcctttcgctgcggaatgcacgaagaaacggtgaactggtttgaacccgtctaccaggtgcgggatcgcacgagaataaattgtgtaaagagcaaatgtaagcccctccacctgtacaacgtctttaatacttctttccatcatttcaccgaaaatttatgttttccgttcacccagtctttacgcggatcggattcatcaccgaaacacagttccagaacgtctttgtattcgtcgcccagtacgattgtatcgtattttaactggtcgcccaacacccgatcgtaatcttctttacgtaaagaacccagccctttgatatatcgtacctctttcgccttatcgcggaacggtgcgaaatcttcaagggagtagaaccatttttcatctttaccgactttcgcaatgataatcggtgtgcggatataacggatctttttcttctcgaacaactcaggccagcggctaaagaacgcaatcagtagggtgagaatatcgcccccgtcaacgtccgcatcgaccatgatcccgatgttgtcgtaagtcatttcggaagagtcgcctggatggagattcaggatcgccatgagttcagacaattctttgtttttgagcacttctaagttactcattccccaggtgttcaacggtttgccacgtagcggaaatgcgccttgtgtctcttcgtttctgcactcgataaactgccccacagcggaatcaccctcggtcagaaacaaagtggtttctaccccgtcagtgtcgatccctgatgccggaacatgttttgcaaccttcgcctttttcgctttcttcttcgctttggtaatggctgctgcttctgctgcctgtttgcgaatcagagcggactcaatgatcggagtgattatttcagaagtatccataatctgtttcgcgatctttttgtagttcagtccggcgtggttgttgaactccccagcggtgttagtcagtttttctttcgtctgactatcaaaagctggtgcattgaagttatgcaaaaacacaaccaaagtcaagcattcttttacacgggctttcgggatctcgatagcgtgtgttttcttgatcatcggttcgagttcagaatagataccgtcgatcatggtgtcaacatgaacaccgccgtttttcgtatccagaccattaacgaaggatttctgtttgaaaccgtcttctgtgctcgccaggatgaaactgattttgttgtttgtctgggtaatcgttttatcaccgtacatcgcgccatacatcgcgaatttgttcgggaggatatcgccgttatatgtgaatttaacggcagggaaagccactgcaagcgccataaggcggtctttgatgacttcctttgtctcttcgtcgataccgtccacaccgaagatagagaagtcaggggtaaacttaacggttgtcccttgctccttcgtcgggctggtgcggtaatccatgttctgcgctccgtccgtacaattgatcgtgactttgcgtttaccgttggatgtctcaccgataaagattgcgctgtaacagtttgtcaggaaagaacctacaccgttcatccccattgttacgcggttttcgtcatcgaagttagaaccggatttagccattgtccaggctgcaacaggtttaggaacaatcttcccttccggcgttctcacgtcatcttgtggaataccgcgcccgttgtccgaaatcgttaccagattgtgatcaatcttcacttcgattttgttcgcatatttgaaatcagttcggatcgcttcgtcgatggagttatccaggatttcgttgatgattttcaccaacccttccacgtattccactttgcggaattgccccatgataaaacgttcatgggcttctttgttcactgaacccacgtacatattcggacgtttgcgaatgtgatcgcgatcgctcaagcagaatgattcatccaccttagcgccctttgctggggcttctggtgctttctgcggctcgttatcgtccattaagaaatctaaactcatattcacctcgttattagttctcaggcattatatagggttctatgaaaaagaaaacccctttcggggttttacttgttgtacgggaatccgtctttcaccatctgcggcttatcaaccgttcgtttcgcctcgcccccgcaatcacaatctttcggttcgtcgcggcttgcgatgctggacattttcggaaattctttttcgcacttggtgcatttataggtatatgttggcattaataaatctctgacaatggaataaaacggatcggggttgcggctttgctgaaaacacattgcttgttccctgcaaacatgagatcagtttcgtacaccatacaaatatatccctgattctccaaaatttgccgctcccagctatcgaaccatttagacaacttctgcaatgaagagaagccgaaaatatagctacgataatttttaccatgttttttgaggttacgcattaaacgaaggtcttcgcatggtgcggggtgacgagtctcggagataccgaagtttaaaccgaactcgattccatgaatatcgagatactcatagagatcgtcttcatcaccgacacaacccgtatacgggcctaattgcttacaccatccatcatatttggataatatagacgctttcaattcaacgcgataaaccaacatgatccgatcctcgtaattgattaactacaagtagagtaccacttatctaatttcttatcaagcagtttattgatcacttgcgcgatttctgtcgtcccgtgggttgtactcagtttcaggtaaatcacatccagggcacacacgatcgcatcaacgctttcttcgacgatatcaccgccgcgttgaggctgaacgagacattcggagatctccccaacctctgcggacaggtggtgaaccacgtcgctaacggttcgttttttgacgctatgagcggtcttgaaaaacttatccagaactacagcggaattttcgcgcggtacttcctcacctttattgacgtggatcgtaatttcagtttccggttctggtgcaacccataccggattgaaaagccctttcatatcgttgaactttacaggaacgggaataccttcaagataaagaatccctgtttcttcatacaccatactgatccggcgtggtgaattgaagtccatcggattcttacgcaacgcgtcatacatacgacgagtcggatcggcttctgatgccatttgacacacagccattaaaatagatttcggggcgtacatatcgccaactttatacttgctcatttacaatacctttatgataaccaacaataaaacagttcacttctggacgttcgccagggaaatgcacacactgcatgacgcgttcagccatgagttcttcgcccaaataaacagaggtggtttcttcgttgtaatgacaatcatacgaagtcttaacactcataccaggcaatccggcgatatgcataaactttgagttcgtgcatggtttaccctcaatgttctttccgtttacatcaaacgttgcaaacatttcggttttgctgttctttgggcgtctgctcatttcttcacaacctcattatatgttgacaggttccattcatgcacttccggcactttggagtaatgatccaggaatactaactggacttgcataacattagcacgatccatattgaaaaggaaacgttgcggggaagtaatacacaggaaatcttcggtacttcctctgcttgcgctaaactcttttgtttctccgccgtcaaatttagcatagactggcgtagaaaaatacggggcgaatagttcgcgtttggaatcgtccgtaatcgcgctgaaacacacgtctacgagctttccggttccttcccgtctgatggtgagcattgtccctttcgtgcgccctaagacgtttacagagcgcgtggtgacatcaccaaaagcgtttgtgtaactcacagtctccacaaagcccatatcacgacgttgttttaacattgcttcgtgttgcgcttctgcatcctgttctactactcgttgtgcggcttcatacgccgctttgttcggatctcttgattgccatgcgaagaataaaacccctgcggctatcagtccgaagattgaccaacttgcggtcgctgatagtttcattttaatattccaaaggggccgaagccccgattttagcgaagatagcgaacgtaaccgctacggtcgatcgcgttctctgggttgttgaagatattaccgcgaatacccttagcaggtgctttccatcctgcggctttcaggatattgccgtcattgtccaggaaaccagcaactgaacgctgatcgaacatttcaccagtctgtttgttgcgagtatcctgcacaatacgatgatacttacggcctttttccagaacgaaaacagtttcaaagaattcgttttcgaatgcgccaccgttacgggctttgaacatcgcatccagtaaaggctgtgctgcggctttcagttcgtcaaaagtatacatggcaatctcctaaagtctgtttcgtttcgatgggataactatatcaaagctatcccgtgaagtctttagcaaaaagtgctatttgttaaacccgtttcccttgataccatttcgggaaaataacccggtcaataaaagttctccccaagttgaaactatcaccgaacaggagaacaccaaacaaagggtcgtgcttgatatcgtttttcccgacagtcttcattttcccttcgtggatcacggtgtcacccaccgtgatatccttgatgcttacttttacatgatgcatacaatcacctctgcgagtttagcaggttttgcttctggtctaactttcaacgcatcattcagattcttttcaaccattgctaccgcgtcgttttcgttgaaaccgttcttaaccagggctttaactactttggcttctaagtttttcatgatgcgttccttttgtctgtttcgtttcgatgtgtgtaatatacaaaaaagcctcctgcattgcaagaggctaatttagcaaaaagtgctattttgaaagaggtataagcatctttcgcataccgccgttttgtgtggcatcatacacgcgtttagcatccataagggagagttcaacatggtatgatttccctttcccgtcaaaatcaaacgttaccgtaccgcttgctacgcttacatgagtaaagatgaactcaccagcgaaatgctttcgaaacgctttgtcgtgatccaggaaccattcaaacgcttccccgtgctggtacagtctgacgataatcattgaaactatgatgaaaatcagaactgctgcgacgatcgtaagctctttcatcacttacccctgtttacagattgacggtgtagcacacggttaacgcgtggcgcttgatacggtttcattttgtacggtgtcggatcagagtattcgatccggttaggtaatgaatacatttcaacatttggctgaatccagcggattgagtcgattaacccttgagttaacgcacgaccgaaacctacaccaactaaacataaacgcataatatccccttactgtgccagaatgtgaagccattcacccagccacacgatcgcctgataagacaaccacaccgcgccggacacacaagcaatcacaccaatgatcgcgaatccaattaaaatgttcaaaccttctttcaaatcaccaaacatgtttcatcctcttttgtttcagtccctacaaaataacaaagcccctgcacgaatgcaagggctttttatcacaattcgactaactgaggcaatttcagaaccatccccggaaggatatagcttgcattgctaacggttttgcggttcaacttagcgatagactgccagcgctcaccacaaccgtataatttttcagcgattgaatacatgctatcgccaggctgaacaacatattcatcgtattcgactttaacgaacgcggggttcatgagaatgtcaaacatctgcgcttttgcttcgttcagtgtttttgcatgtacagttttacctacaaatgataatttaatcatcttttcctcggcagactcaatggatcggtttcttcttcgcttggtggttcttctaaccccagcgcatatctcaatgaatagactatcatcaaaacatctttcgcgcaatcgtgaattgaattatgcatcacaaaaccatcaagcaaccctttccgaagaggacaggtcgaagcatcacgcgttaacaggcggttttcgatacatgtacgcacatcgcgactattccagaacacggtcggcatatcttcgaagatgtcgatcttgccaaccatcttacgcacgatatcaaccaggataccgcgatcgaattcagggccacgaacataatcgagtgattgccaacggctcacaccgtccgcttttaggtcttcaaagaattgtcgatgtcctgcatagagttccagatcttccggcgacggtttcaggatttgacgggcttcttcgctttgttgtttccaccaggcaattgttccctgatcagcaatacgatcaggctggttgcgcaaatcaaatttgtacttgcgcccccgtgcaaccagttccgcgaacgttggcgggttgtggggatcgtcaacaaatggaacgtatgagagttcgatcaccttcccattcggggaaggaccaaccgtttcataatcccatacgtaatctacgggtaaatgactcatgaagttctccgcttatactcttccatgaagtacgccagcgtaagcgcaacttctgggttgatatcaaaagtttcaaactctttgctttgcaaagtcatcataccgaactgacgcagaccggaatgataaattgccttttccagacggttcgcgttttcaacagcttctgtgaattcgtccaacacatcgcgatcgatgaaatgcggaagttcttgaacaggggttttgaaaattagatctgcaattgcttccgcgtggaggcgagggatctggatagatatatcttttttcatgatattaatgtccatatgtctttattttcacgaatgtttcgtgccattctaaggatcagcacgataacgccatattcatcataagtcagttcaacttcttttgcaataggagaccatgaataacttggcccgttcggagaatacagaatatcattagatttttcaatgaagcgcaaacggtgaataacttcttgcggatctgctgcgctatacatcccgaacacattgaccgcatgtggatctttttctcgaattttatcgagtgcttcaagaattcggggaatgtcttttacaaggatagtcaatttcataataacctcaaaaggggcaaagccccttatacataatcaacggtgtaacgtgcgcgggttacgcccacatagattaactgcttacacagatcgtaatctgcgaacgcatacgcatcgcgcgtgtacatatacgcatggtcatacgtgctcccctgcgatttgtggtacgtgcaaaccggaagaggcttaacatcctggaacttgtttttaatcgcccagaacgaatgccacggggctttatagcctgtttgttgcttgatgcgcttataagtgctcgcaacgtaggccagatagttgcccagacggtctttcatcaccggatcaacaacaacttgaatctgtgcttcggtttcctcttcgagcgataccgttttcaggagatagaattcaagttcgatcttctcgtcgcacttctccgccttgataacttcccgacgcgggatgatttctaagactcggattttttcgttgttattatacacaatctcggtaaagatctgcccgttcaaccgcatttcctgaactaacggttcctgcatcacgatcacttcatcgagaatgaaaggttctgttgttttgtacaggtgtttacggatcgttgcgttcagcttgtccacgttgtcgttagtgtaagcgaacatgcggttctcgatcaagtcatccggcgttttgacacggcggaaatactgacggaggaagtcaacagcgttagcatgttggaacacacccagatcaccgacagacatcggtttcagcatcttaccatcacgtacagcccgtgaaacctgaataatcgggttcccttctgcctgacgcatgattttatccatacggatgacatcaaagatttcttcatcaaagaacggggagagttcaacgcgtccatcggcgtttaccggacggatctgatctttatcacccagtcccaaaataacagcgttgcttggaatactgcgccggatgattcggaacagatccatatcaaccattgagacttcttcaacaacgaacacgcgacaggtagacagatcaggcgctttctttcctttctgctgttcgaacacacgcagttcttcgttagtcacagggctaatcttcaatgcagaatgaatcgttgttgcgtccattccggtagccgctgctaacacgtttttagcctggtgtgttggggcagttaaccaaataccgctaatccccaaccctttcagagtgttaaagacaaacttaaccagtgttgttttaccaacaccagggccacccgtaatagttgtatgaatggcgttctggatgttgtggatcacgcgatcatgcgcggacttctgatcgtcactcagatcatcaaatgttaactcgctcataatttgagtaataccccttgaattttcgaattctcaataaaccaacgcatctcttttttctgttcttcggttgctggtagttgctcggttttgcggaagaaactgaaacgcggttcgtccggcgtgtagttcagtttggtttcgtagcacttgcggataaaatctaatttatcttttgcaagttgtggtgatgcaaacagttccggcgttttcccgttttcaacgtatggaatagtaaagccgtctttgtctttcgtaacaatgatatagtatttgtcaatcattttcgcccctcatagatgacgtagaaaaaacctataacccatagcaatgataatactatcaaagcggcttttctgtcaacaccgttaacgtggaaaacgcaccatccgaagagatacgttatcaccgcgcaaacgatataagacaaagcaaatacggcatgtagcgcggtgagttccattagtagttgttagcccaacgacgcaggttttccgcctgtttcagagcatacagcttgtagatggtttccgcatcaagtcccagcgcgaggaacttacacatgaagaagtgccactggtcaatcagttcaaacaggatttccagtttgtcttcttctttcatttctgcgaatacctggctacgcagttcctggtgatttgctttccacggtttccagacaccggaagccgcttttgcaccgcgtgacataccgcccagagcggtgtaaagttcgcgggtttcgtctgcgattgcatcatcttgcagtttcagccagtccaggatctcaccgcacgttttcagttcgttcggacgtggaacccaattcagggtatcagacaggctttgttgtgcatggttttgcaagtccagcatcttttgcagcgggtcaattccgttctgtaatgcattgcggtagaaaccttctaccatttccagatcatcggctttaaccaggtgcgcacagctattaaacacaggagttttatcagtcatatcaatctcattttttcggtgatttgttccacgacttaaaccgaagtttcgccgtgagtccagaaacagtattatctttcaaatactgcatgatttcaagtttagttgcgccgtccgtttttatcatttcgttgatatcttttgacggccacgggcatttgtcccacaacacaaccttttcgccagcctcaatcaattttaaaaggcggtgagtagtatcagggtgtctcgcttcattgtcaagaacccagacacgcatatttttatacggaacatcggacagcgccatttgtccgcccgtaatcgcaccagcattatctacaaacaggctatccagcggcccttcaagcaggtagacaggtttcaacggatcgatggtatcttgaccatacactttcgttgagtgttcacatgctttgattgtcatgtattttgcgttggcattgtcacgcaaggcgcgtccctggaatgactcgattttacccttttcatcaaagatagggatcaccaaacgcggttcatccttcggtaaagggtatgcgtccgcattcacagagttaaccaggtgttgccattgacgcgtaaaccagaggcgatcatatttgtctttaggtatgtgacgacctgcaacatacttaacgatagggtgattttctggcaacgtgtccagacgttcgcagaactgcaattcaggaatatatttcttttcttccttcggcggttcttcgtgcgtctgttttaaatctttacgatccttgaaagattccatcaaatacgccgtgtaatcatccgggtaatagtctttcagaaacacagaaaacggcttgctgtagttgcagttaaaacaaccacacatcatgtgtgtgcctcgttttgacgggaatatccagaaacgttttttgtgcttatccttcatggagtcgccacaaatcggacaacgggaatggatactgaattccccaccccgtcgaacgatttcgctttgtggtaatgatcccatgatacgagttgcgaactctatatcaagatacatgtttacctctatcggctaacttctttctctgtgccgtctaaagtgattttccattcatagaatatcttataaaacggataaggtctaggaatatcgacacccgatgatgtttttctttcgttcgtgtacacgatcgctgtgtcgctcatgtacttgatacggataggaaaccaggtgtaattgttcgcagtaacccagatccgataattcaatggcggtaatggtttcattcttcactcttcatgattttacgtttgcgtttatgcggacgtgtagaacccagaaccttcggccctttgttcgtgatcgcgcctgtagtcacacccgaagcaatattatccacacttccgcctgaatcacctgcaaccatttcttcgttgagtctttcgcgaagttctgggaggttcatcatgatctcttcatgttcttgctcggtcaggttccagcggctccgtaacgagtcatacgcgctcgtaaggttcatgaacccagacatataaggaaccgcgtttaaacggcgcttgatgtgccttacagagcgatggaatggggaatatgcttccagttcttccttcgtcttcgggtttttcaatacttccccttgaccgtcgatgatacccagcttgtaagccgtccattcagtccagggctttttcagtaggcgaatcattcgcacactgtaggttaaatccatgtttttgattaattgatcgctcatagtctttactctattgtgaaagtgaaaaggttttgcgcgggttctggctccggttcggggaattccatacagacaacttcacacatcggtttcacgcctttccattcttccagataatatccggtatcaatgccgcaacctggttgcatttcaaggccagtttcatcaagaaactttttgcatttcgatgttgtcgttgattcgtcctgttggaaataacgccgtccagagtaacgaaaattcgcggacatctgcgggagaatgaacgtacccgcacgggcaatctgtgaagcacgttcaatcactttatattcaaattccgcgcccgtatacttacccttaaaattggatgtctttatcttgccgaaaggaggattgctgatcgccatatcaaacagagtatcaaactccgtcgttaacgcgtctgcgttaatccaggtcgcttccggtacgatacgcttacccaacttatagtatgtatggtttaactccacacagacgatttcacgcggtttggcgtacatcatcatatgaagcatcgcgaaggatagcccaccgatacccgcgcacaggtcaacaacgcttccactggtacaagcatcaatggtgaaatcgcgagcaagtccgatcggggtaaagaatgcacccagttcagagttattcgtaaatgcaccttcatggaagttttcgataatgaataacttttcgtcgtaggttagcgccttgtcagactccaccagatccattatcttgttgtgttgtttggtttccgctttcgttaacttcgccattggctttttccggtaataagaacagaggggtagattctaccacatcaaagccccaatcatcaacaatattgctttcccagtcgcgggtttcccacgggctgcaaatccacttatacaccccagcaggatcttcaacctgttcaggcatacccagcacttccgcattgataccttcgtccagatagccaggatgaatattaggccagcgcatgatatcaacatagcctttgtcgtcaaccgatacgatccattctgaacgatacgggctttcgaactcctgttcttcgtctggaagaatcatatctaataaatcactcatttcactaacccttctttaacgccctctttcatggctttcagaacaccgataaaagcgtctttgccaccgatagcgccgatgataagcatcaggacaccaacacaacccgctaaaccgattctgaacaggttccaggcaaacgggatagccagaagcaccaaccacgggaacggaaatcccataagtgcgtttagaaccagtaagataaaagcgattgcaagtttcatgatgtcctcctttgtttgtttagaataaggtatcacctttcgtgaaggattgcaatacctatagatacaaaaaagcccctttcggggcttaattttatgctttgttgattagataccgaagaacgtttttggcctgaacttcgttacagcagagtttgaattcttggtcgattgggaggaagccccagaggaaatcaacgctaccttcaacatctgctttcccacttttcagcatttcaaccagcaaacctctgtttactacgctgttcactactgcatcgaaataacccgcgctgaaatccagttctgggttcatcacttcgtcgtatgggttgttcagtaagttcatttggtatctcctttaatccgtttcgttgtctacgggagtcatattatcacaatcataactcccgtcaacccctaatcaggattattttgcgttttttgcaatccagagagtcagtttagggaatacatttgccattgccaccacaaacagcacccagaaagccagcttaatcacaccgatcacgatcagaggtgcaaacacaagccaccatgaagcatttgccataaccccgattgctgccagtttcagagacaggaggatcaggaacacaataacgagaatctttttcatttcactatacctttggagggggccgaagccccgttaaaattgaatgtctgtactgtttgctacttcggctaacttactgcttcggttagtctcggcttgttttaccatagcaccttgtgcttcttcaagcgttttcggcatctgacgacctttataatcagattggaacccgatatcgctgttgtcggtatccatccagcgttgattacccttgcgcacttcgagtttgaagtggttaaagtggttcttatcgccgtaacgggatttgatctgcttgaacaactgcaatccctgatcagctaactcgtcggtctcaatcacagctaacataaagtcagcggtagctggaagaccagcagattcggcaacgtcgcccatgctgatatcagaagcatcccacgcggcgcgggtagtctgcgcaccagtccacattacggtattcgtttcaacagccaaaccgcgaagttcttcggcaatcgctttaaccaggatgtatgtgttttccgccccgcgtacacgggtagaagcacagatccccaggtagtcaacaataatcacatcaggtacgaaactcttcttcaatttaagctctttaatcagcgctttgaagtggttcgcgttcgcccctgctgttgggtattgcttaacgattaaacgcccgaccttcgactgtttgaggcgttccatacggttcttatagtccgcataggtgatgtttccgttgtcgatatcgtccatcgcaacatcaagcaggttagcgtcaatacgtttagaacaaacgtgttcagccatttccatactgatatacaggacgtttttacctgattgcaggtaatcagcagcgagagaacaaagccccagagatttaccaacgttaacaccagccattaagatgttcaatgttccacgttctgcgccgcctttagtaatggcgttcaggatcgggatattgaaagcaatcttcatcgctttggactggtaaagcatccagcgtttttcatagtcttcgaagtaatcatgaccgaccgaactatcgaagctaatcgctaacgcttccgccatgatgtcagggattgccccaacgtcagggattttgttgttgcgttcgccagcaggtttttcagcattcgcctggatctcaattgcacgggacagagcgcgatacattgccttgtcacgacaataggtttccgtttctttcatcaaccattccagatcttccggcgcatttttcatgctgcggatcatctttttggtatcttcgtagactacatcactcaggctctttttgtccagagctacttctaaagcagtttgtgaaggaatgctgttgaattcctgtacgtgcttatccatcaaatcaaagagaatctgcgcgttcccttcgaaatattcacggcgtaaatggggccacgcctgaacaaaatacgtaccattaaaaaccagatttgaaaatattgtttcgacgatcattattacctcttaaaccagattagcgaacatctgaaagaaattatacagctttactttcaacgccgcccataaggtcttttcaggctttgggagattgggcttgatctgcgcgtagattgcatcgtgaaccagcggaatcagtttttctttgtcttcgtccggcgtactaaattcgactttcaggccgttatcccaatacaccttatggatgtacactaagtgtgcaacatcgttttcatcgttgatcaacagttcttgaataacgtcctgcattgcttcatcaagaatgttttttgttttttgttcaatgtccatgattcacctattaaaagggggcaaagcccccagttgtttattactcttctgacatatccacatcatcagggatatcgtcatcgagatcaaatttatttgacggttctacttcatcgtcagaataaagatcttcgagtgctgccccgtcagtgatctctttgtcaggaatacggtacttatcctgaatagcatcaaggaatggttggtgagtgaacagaggtttccagaactcaatagagttggtttccgattcacgccatttcttttcttccagttcaagttcgcctgtttccgtgttcaggaacgcacgaccgcgccagcctttcgttggagtctgaacgaagttcatttccatagccagatccagaagaccagagaacatactgataccgccctcataggtaacatgaagcgggaatttggatttctctttcacgaaacgagatttctcgatgttcatgatgaagtcataaccgacaacttccgtaccttctttcacctgttgtttgcccaggatgatcgcggtgtctgcggaatacatcagaccagtaccaccggaaatgactttcttgctgtacatttcttgtgtgtcgtatgtgtgacagatacacaccattggaatatccagatccgccaggtaaggcgtaaccatacggaacatacctttaagtgctttagcgcgggtcatgtcctgtttgtcgttgtcagacagggcatcagccagttcttttttactcgcggtgttgcctacagagtccacgaaaatgatcactttgtcgccacgttccagcgcgttaagctggctcacaacgtcatttcgaagttgctcaactgtcgtgatacgagtatacaccacacgatcggggtcaacgcccattgatttcaggtaagacttagttacgcctttctctgaatcgtagaacagacacacagcatcctcattcgctttgaggtacgccgcaaccgtcaccagccccagattcgatttaaagtgttttgacgggccagcaaacagagttaagccggaagtcagaccaccatcgaaagcgccggacagcgccaggttcaggatcggtacacgggttcgagttttggtgatgttattgaaaacatcgctttcagacagaattgacgcagattgactattcgagtttttgatcagttttttcaggagtgctttattagacatttatttttccggtttatatacacgcataatatattcctcacaaatttatataaatggggcatttctgccccgtcaggtcttaccagtcatcaccgaacagagtgttcagggatgcgcgtttttcgtaatcaattttacatgcttccgtgatgttttgcaacgggctaatcacatgtttttcaaataatccgttgtagtcaacccagttgagaatatcactttcgatctcaacaggtaaacgcgtaccggattgccatgcgatgcaatcggattgccacgggtttttatctcgcaacggcagaaccataaccttctcaccttccataatcggggtaattccttgaaaacccttcgtatatcggttaaagaacagaacgcctttgatgtggtttggtgtccctttgattgggtatccaaaatcatcacgatattttgagatattgttagcagatgatacaccagctatttcgcggtagtcaagcgccttatactcttcttcaaatactttgaagtgttcgtgtaaggattcttcaccttcttgcaggatgcgacggatcgcttctttcaagaactttttaaccgctgtcggtgtactacttcgctgggtttccattcccatgatctttaatttaggtttctcgtagcgggttccttcggagtcccatacgttagccgcatatcgtttcttagccgtccagaaactacccagacctttcgatcccagaggtggaccagaaatgatttcgcgatccataaacatcaggtgttcgacgttgttcatgtactcgcacagttcgcggtagcccttatcaatgataggttccatgcgttctttactgaacttatccaggaagtcaacccaatggttgttatccctgaacttactttcaccgccgactttcgcgatcacgttgtccatacaaacataaatggagtcggtgtcacagtaacgcacgtatgcgtaatccgtggtgttgcacagttcgttaaggtattcgttaaccttacgctcaatccactgaatagccaactgcccgaacatggtgatcgcgctggcgtttcgaatatcgaagtaacggaaatgttcgttacccaacgcaccataaagggagttgattgaaatcttacggttaagctgtgcggtgtttgcctgtgcgatcttcttctcacaaactttcttcacggctttaagcatttgcttagacagcgttttcagtacagcttttgattcatcactgaaatcttcgtagaactcgaaatcagggttgatcatttggttgtgcgcgtccgtcaggtgttcgagttcgtgcttaatcagttcaagatttcgctcacccgccatcattcgttttttccacatcttacgctgatcaaatactttcttgatctcgaccggaatcacgcctttaacatcgcgtcggaacatccacccgttaggagagcagctaaattcatcgctaggacgcggcgcagtcttattgatgtattcatgcatcggacgcactgcaaagctgttagcgattgtctcagggcttatattcacctgtcggatgatagacggatacagactggttaagtcgaacgatacaatgtaacggtatggagcgacaaccggatctttaacgtatgcaccatcatacggcgttttagtatggcgtttgttttctgggattactttcttctcttcacgcagagagttgtaaatgattgcgtcccacgttttaagcggtgacataaccccagggaagttgattttcgcgtagtatgctacagacagaaccagttcgataaagttgcgtttaccgtcgatatccaacacgcggataacgtcaacgatgttatacgtgatgtatttctggtgatccgcttgacgcagttcagacagagaaccttcgtaatcaactttgtttttacccgtttcgaactcagcgatcgcgcccagagcgtaagtcggttgcggggtgaaactgaatttcttgtagagatccattccatccatttgagcaacgccgtaaatctcatagcccagttgttcgttcccgtaatggtcggtcgttgtcttcgcagtcactttcccgaacgggctgaaatgacgaacaacgttttgcccgaagatattcaggtaacgggtgatgatatacgcgatatcgaacttgtttgagttccagcccgtaacaataacaggcgtccgctctttccagtctttgatataagccgacatcagcgacttttcggtctggaatgaacggtaaacaattttcttcaaatcttcttcgctgatctcgttttcggtatcaactttcgacgctacccattcatctaaaccaccctcgaccagatcgtacacaaagaatttatcttcaacgctgtcatagtgggtgattgcgtcgatagcgtattttgcttcgcgtggatcagggaattcaggcgcggtaacttcgatatcaagtgaagcaatgcggatcttgtcgcgatcgtattcgatttcctttctgtaggaatcggagatatacgccagcctgaaatcatccatgcctagcgcttccatgcctacatctttcattcgctgcatccagttttttgcttccttgatgctttcgaagttctttttgatgcaggtcttgccgtaaatgtcgcgatatggcgagtctacacccgccatagcgtgttgaaacattgtaggcgcatattttgttttgcgaacctgttcgcgtccctcagagtcaatgaagcgctcgtagatgtgatcgcccatttgctcaacggatagataaaattcattcattacggttttctttctccgtgtttaatcgtgacaggaatgataccccagccagcttgatcagatcaagcgagcgttgcgctaatttgtgatagcgttgggtgtcaggccgatttagttgttcaaccagcacggtatattcttccatgatgcgggtatagaacttagggaagtgatcccgcgcgtatgcgtaggtgcgcagatcagatagattgcaagtaagagacagtttgatgtcttcgctatgcagacggttgatcaagtgatcgccggattcaatagctttgatgatttcttcaatacgaattttcataatttagtcctcacaagtggtgtacaaccaatataacaaagcccctgcatttctgcaagggcttttgattaatgtccgatccggtacttgtatttcaaagtccattcagctttttgtgcgtgagtcaatacgcggaagttgttctcttcggagaatttcagatccggcgtaaggatggaaaccataccccactcttccagaagtcgcgcaatgttattgcggcgcagttcgtcatcttcggtcatgtcaacctggcgaccgtccagcttcaacagttctttgaagtgtacgataaaataacgcccttgtttctgtaggatgtggcaagactgccacagcattttctttttgttatttgcgatcccgatacgggtcagcgtttcgcgaattttcaggaaactgtcatcgctggacagtttaatttcgagcatgttcatacatcaccatttctttattagttgttcaacctttttctggtcggttttatttttcacaacatcagccaacacagataaagcaactttcatatttttccgcttccactcgtccagtttttcaagctgtttgagttcttcgtaatattccattgctatacgtgtatttacaccgtatcgtttttggagaacatgaaggataactttcatttcgttatcttcggtgagtttagcccacgccccgaaccgcttacctttgcgcaccgtatgcaggtaataatcaaagtgcgcctggtctggtaaaccggaaccgatcatattcatcgtgtatgcagggatcagcgtttcgatatgctggctcattgcattgtcgatgaaaaacttatcgtatgaatcaagggcagagatccgtaatggtgtcttcccgttgttcagttcttcgagcaccataaacaaggtgttttccttgtctttggtgtactctttcacaagttcttcgatcttgtcccagtctttagaacgccaggccgcttcatgttcgttcagttcttcttcatcgagaaaagcagccagtgacatttttaagcctcccacgcgagggtaagcattaatcccatgaacaggtattgcaggtgaatctctttgttcactgccagcccgtactgtgcgttgttttcgcctactgcctgaatgagtgcaaccttagattcgttggtgacgatcgggtataccgcatccagaagtttagccaggaaagtttcatactcaggcgcgtacttgattgcttcggctcgcagtgctttgaagttcttcgctttaagcccctcaatcactggtgtgatgtccgaaccaacaatctcagacagaataccagcatcaattttgccacgcttagaatagaacccaagagctttaacgatggatcgcgcgtctggataatgtttcttcacgaatccggcgatcacctgctggtcatattcgattttctcgatttcgaggataccgaaacagcgtttgatcatttgcttcatgagttcaacgcgttcttccttcgacggggaaccgaacttgactaccggacagcgggagataagcgcagggtgaatcccgttgatgttgttcgcggtgatcagaacagttacgttcttgctatacgcttcgataaagctacgcatgtgcttctgtgcttctgccataccagggcgatcgaattcgtcaatcaggatgattttgccgcctttcttctgcgtcatggaggatgcaaagcgatccatttcgttacggatgaagttcacaccacaatcggaaccgttgacaaacatcacttccgcatcaacttcgttagccagaaccagcgccagcgttgttttacccgtacctggggaatcagaaaccagagtcatgttgtcgatgcgcccagacttgatgaagccgcgcatcgtcgctttatcagcagcagggagaatgcattcatcgatcgtcgtcgggcgatagcgctgatcccatgcgaattcttcgggagactgggagattttgccgtatttggtttcaattaactgtacgttttcactaagttccataatattaccttcaattgattatcaaaaaggggcttaacgccccttgtgtactgctttgtttatcttacttgaactggctggttgcttcaagtaccactacatacgcaacgccgttttcggacgagaatttcgcagcgccgcgagaagagatttcaactttgtaatcgctgttgatgaactgcatgttgtcaatcttcatatcgaagttgaacatgttatcaccttcgtaatcgcccacttctacagagaaggttgactggctttctttacttttcgcggtgattaccagcttgccgttgattggctcaacagacaggtcggtcagtttcatcatgcgtgacgctttgatcagtttttcgaaatcgttcgcgctaatctggaaaatcagatccgcaactggcatttccagacgcttcttaggctgtacgattgtggttggatcgcttgaacgctcaacgattttcattttctcaccacggatgacgatttcgccagtggacagatcgtgagttacttcggcatcagtgcctacaacgttcagcatgttcaggaatgagttcagatcgtagatacctacatcttcgtcaattacgtcagaaatcgttgcttctgcgtaaactacgctgttgatggatttcgtcataatgaacgaaccctttttcagcattacagacgggttgatctgggagaagtttttcaggatatcgatcgtttgtttagagaatttcatattcaacctatagttttcaattaggcaaaagtgccgttaatcagggattctacaatgttcttcgatgcattgtcaaggaattctttgcttttggattctgtgattttcgcacccgcttcgcgagcatcgtaaatgaatccggtatgtactgcgcttactgcttcgtcgatccgtttgtaatgctcaaagcgttcagcttgaggcatcgcacggaaaatctctttgatgttttccggcactttacctacccaggatttgcgaacgttgttcagatgcgctacatatacgttttgttctaaattcatatctacctcaaactttcaaattgggggctttcgcccccgtaagcattacagatccagcagtttatccaggtcgtcatcaccggaaccaccttccagatcaaacggaggtgtatcatcatcttccggtacgcttccgcctacgttcagttgacttacgccaccagattctttagcacctttggactggttgccattatcgaagtttttcagttcgttgtcaaatgagttcagttctgaatccagatccgcaccagcgcttgcgccagcacccattgcagcaccaccgaatactttggtgaacttcgcggtcagttccgcagttggtttgaactggtctggagcagtgattggacgcagatcgctcataccttcgaagatttctttctgacgcgcttcgtcttcgatgcctttgattgggccaggaacaccaaatttgctgtcgtcgtagttaggccagtcgcctactttcttcgcggtcagggtgaagttagcaccaccaaacggacaggttacagcaatacctggttcatccagatcagggttgccagcgatagcagcggtgatcttatccatgattttcttgccgaaacggaacttaaacactttaccttcgttttccggcgctttcggatctttaacgaccagaatgttagcccagaaggattgtttacgtccaatcatacccagagttttatcggcttcgctgcctttcactttggctttttcgaacagatcgttgtcagagatatactgacatacaggacaaccatcataatcgccgtgggtagacggacagttttcaatgaaccattgattgttctttttgaacgaatgattcaccaggcgaacaaacgccagttcgtcatcagagcggttaggcaggaagcgaatagtcgcagaaccgtttttctgtgcatccagagtgagtttccactctttttcatctttctggaagccggatgaacctttcagagcggcgacttgttcttgcagtttggttggatcttgacgtttaaagaatgacatatgttatttctcgtttaagttaattaaagtttgtttcattaagtttcggtattttacgatttcttcgttactgatttcaactaattttctgtatgcgtttagttttttactaaattcattccagacgaaatccgttgcgatttcatcgtgtttatttatgatgtctaaaaacgagtcgagaatcaagaatgattcataagaaatcaccccagactgtacgagtttgctgatatacgaggttgatgatttgacgctatactgaaacaccgttgagaggggaatacctttcatgcgggaaaattcataaaggttttttacatcgtccacgaaaatattatcaattcgcctcaacttgcctatgtattgacgataaaacacgatcgtatcttcgtctacatccccgacccagaagtcggggttagctaccatgttggagagaagtataagatatatttctttgaatgtaaacctttcggctaactttttgaaaaaatacttatctcttctcttttcgaacgctttttcagtgatctttatttcccatttgtacttgatcgcgtcatacttcccagaaaagtgatttttcatcaccatgtacagtttgtataccgcgatcggtttcaaacgggaattagcgtctgaactgtcaaacggggttttaaatttcacatgaaatcatccagggtttgcgtcgtcgcgtggtctttagccacagaaggacgcagcagattgtttttaatggcttcgtcgctaatcttgtcaatgatcgctttcggtactgttttggacagcatagcataatcaatgctgttttcgtccatccattgtaacgtagcttccatgtaggttgccccctcagaggcaaccagattttcgatatacaagccgacttcggttttgtttccgatttcgctcatattacgccttatcgatcacatcgtacagttcgataagttcgttgttctgttcttcgaacgcggtacgtgcctgttcgtgatacagtttgaacagcttgccgaaggttttgccgtcgataccataatccgttttcgctttggatttgatgtctttgaaagaaccctggaagtgttcgatctgagttttcacgttcgacgcttctttgatcagttctttaaccgctttagcgatgtctgggttttcttgcagtaattctacactcattttgttacctcaaaagtcacttagtttttcatacatacgggtaagtttgcattccatgaagtatttctccatttttgctttgttcccgatttttggagcattgtacgcttcttcgattgccgttgcaacatctttcggaataaaatcaaagtcgcgaagttcttcgttttctctgtagcggatcgcccactcttcgggcatacccacggtcggatcgtccgcttccagccaggcttcgagttcagcagccctgatttgtggggcgcgttctccttcaaccttcgtaacaatatagtcatttcgcattttaatgcaagcgatactatcttttttatcgcccttgatgatcttcatgcgcaaatcgttacgaggtgaaccatatttcggtgtaacccatttcttttgggttggcgaccactgacgcacaccctgatatttttgaagggctgcaaagtcaccatcagcagaaacgatcaggacacgtttaccttcggataccgctttacgcgtcaccacaccgatcacgtcatcggcttctgcgaagtcaacacggatacctttgtacggtagattagcacggatttcatcgtatgtcgggtgaaggaaaccattcaggcgatcccagtcccaatccgatgcttcttgttccatttttcgtttctttttgtagtaccaggctttacttctgcgccaatacttgttatcatcaaaggctagaacaatttcagggtactcgcctttgaatttaaccacattgtgacgaatggtgtcaagcactatgtgacgaacaatttgttggttgatgtcattctggtctttcggcttgaagttgttcatcaacgttgctaccgaaaggtttgaaatatctatacacatcacatcaacaggatcatcgtcattgctcattaagctgttcaggttgaacatacttgcaaatgaagacatttcaatacctcgttgttgttgaatgaaactgattatagtgatcactttttcaaagtcaatagatcatttcaaaaatctgagcgaagcgaaggacacgaacgtagtgagtgtctatgtactgaatgtacgttttaatatttttatattttatatatagagaaaacagtacatttccgtatactttttaaccaatttaactatccgtttcgcttcgctcacggaagcgcttcgcgctgattttattaaataatatagattggaagtaggtttgaaacacctgattcaatcggctataataaatgtattcaatttggagaatataatgactacaaagatttatgcagataatgataagctgtatccagttatgtgtaagtggaaacagcaaatccgtgaaactggtgatcgtaagatgccggatgaactcggtattgcgattatgaacattgctcacggtttggcacgtcgatacaacttcaaccgttattccgaagactggaaaatggatatgatcgatgatggaatttcggcaacgatttccggccttcataactttgacgaaaccaaatatacaaacgtctacggttacatcaacaaggcttgctggcaagcgtttgtaactcgtattctctacgagaagaaagagaacgcgaagaaatacaaatacttcctggaacatgtctatgacagcgatgatactgatatgaccacgatagccgatgaaactttcattcaggatatccatgacaaacttaatcagtatgaagagtccgcgaaaaaaccaaaagataaaatcgaggttgtggacgaatcgccaacattggaaatgtttctatgaaaattaaaattgacctgaacaaaattttagcagatgctaacgacgaaattgatctgcttccttaccttgtgaaattagagttgcagagcttagggattccgattatcatcgaccctacagatgtacgagatccagacttccagataacagaaggtcgtctggactatgtaataaacgccgaaacaatgatcatggagatcacttactatgaacgtgcagcatgaagtaatcgacgaagtacaccaaaaatcagcgctggatcttcgtgaagaagaactggaatccatcaagggtacacgcattgaacaggaagccctacgcaaagcgcaaaagttcatgcggaagaacaaagcggaatggaagcgactgcataaacacgcagagaacgcactcttcgaaggtaacaaagagcagtacgtatacgcgatcaaaaagatgcgtgatatgctcaagcaaccatacaacgatgaactgattgaaacgatgtggatcacttcgaaccagcagttgaaagacctgttcatcatggcttctgaaaaatacggcaaataaaccccttcgggggttttgaggtttatatgaactatgttttaattggggatacccatgccggacttcgccaggataacccctggaacgaagaaaacctgtatgcggtattcaaacagatcgtagagtattgcaaagaacacgggatcacgcgcggcttccatgctggcgacttcttcgacgttcgaaaagcaaccacacaaacgacaatgaattttgttcgtgaaaagctggttcctcttctgattgaggcggggatcactctggatgttcttgtcggcaaccacgattgccaatttaaggacaaaatacgccccaacgcgccacgcgagatactaagtcaatacgaatgctttaatgtcatcgacgaaccgaccacggttgatttaggtggcggaaattcgattgacctgatcccgtggatttgtcaggaaaacagccagcgtatttttgactacatcaaacaatcgaaagctaacttttgtttgggacacttcgaactgtctggttactatttctacaagaacagcaaagccgatcatgggctggaacctgatttcttgaagaagtacgatcgtgtttactctggacactatcaccacgctaacgagggtgataacgtgttttatatcggtacgcctctgactatgagcgcaaacgacgaagacgaaacacgcggattctatgtgttcacgggcaagcctgaattgactttcatcgctaaccctgtgtgtcaccatcgccggatcatgtatccagcacagaaagatgttgatctcgaacagttccgcaactgcgcggtgcgtctgattgtcagtgaaattgatcaggggcttgcaaagttccaaaccaaaattgaagaaattgcctatgaaattaatatcatagacaaagttcaaacagattcggatgtcgataccgactttgaaatcaaaaccgttcgtggtcttatcactgagtatatcgccaacatgcagatcaccgacgatgaaaaagaggaagtgaataagctgatcagcgaactatacgcggaggtgtcaagtgcatagccgttatgatgaatatttcggggcgaatccccgatattctcacctgttgcgtatgttgggaatgaaacacatcatttccacatccgacgaagcaggggaaaccagcgcagtttgtttgaccatcatgaagggtgcatggcattcatcacgaacatggtcaatattcatgcttgatacactggacgacgatactctatcatatagtattgattcatcagttgttcaaatgatcactgaattatgtgaacggattttaaatgaaactaaacttcaaaaaaattaagtatcaaaatattctgtcggtcgggaacaccccgatcgaactggaatttgatacagcaaagaaaaccctgatcacggggaaaaacggtggcggtaaatcgacactgatcgaggctttaacctatgccctgttcggtaagtcattccgcgatctaaaagtcgggcagttggtgaacagcgtcaacaaaaagaaatgcctggttgaactggaaattgaatacgggaaagactcgtacaaagtggtgcgcggacaaaagccgaaggtgttcgagatctggaagaacggtgagaagttgccggaagactccgcagcaggtgattatcaggcacagcttgaatctatgctgaacatcaaccttgtgggcttcaaacaggttatcgttcttggtacagcgggctacactccattcatggaactgaaaacccccgaacgccggaaactggttgaagatttgctgtctctgtccgtcatcagtgaaatggacaagttaaacaagtcatacattcgcggtgttaatcagcagttggatacactctcaatgcagggtaatcacatccagcagcagatcgcaacacaccagcgcttcattgacgaacagcgagcgaaagcaaaccagaacaacgcccgatacaaagagatctacgatagccacgtagaaaccgcaaagaacatcaaagcacagcttatgcagttgcaagcggagattgcggaatcggtgatcactggagaagaccggacggaagatatcaacaaactccgtgacggttattcgcggctctcaatgactgtagaacagtttaaaaagctggaggtgatgtatcagaaaggcggtgagtgtccggcctgtaagcaagcgattaaacccactcctgagcgtatggcggagatcgcagagaacatcaaagcgggtacacaacgtttaaccctgatcaaaaccaaacaggacgagttgcaagggatcatgaatgacttgctgcaacagcaacgcgcactcaatgccctgaaaaccaaatatgaagccctgaaaggtactctgcaaaacgaagttgccaacgctaaacgcgcacaggcgatcatggaacaggcaagcgcggaagtagtcattgatgaagaacccgtgaagcagttgcaacagcaggaagcagaactgaacgaaaaacgacaaggctacgtcaaggaaaaatatattcgtggtattgttacggatatgttgaaagattccggcgttaaagcgagtatcgttaagcgttatattccgtacttcaacaaacagatagcatattatctggatctattgggtgctgattatcagttcactttagatgacgagttcaacgaatcgatcaaatcactggggcgcgatgatttcagttatgcgtcattcagtcaaggcgaacgcgctcgcatcaacttgtctattctgttcacatggcgtgacgtgacaagtaaagtatcaggcgtggatctgtctctgctggtacttgatgaagtgtttgatgggccacttgataaagagggttcattcgcgattaaatccctgctggattctgtagatggtaacgttattgtaatcagtcaccaggatcttgatccgcaggacttcgaccgccacatcatcatgtctaaggttggacggttcacaaaaccatcaatcaaagatatggcgatctcatgttagaacgtgaatttgatttaaagacctctcccgaagtggagaggttttatctccataatgaactattggaagaaaaacatgtagttacaatggcagatgttgaggaagcattcaaagataaccccattgaattgacccgcatcaagaataataaatcttcggtgtggttcctcgaaaaaatctattgacagtaaaacataaataccttaaagtcgcccgtgtactgagttgcacgggtttttattttgaggaacggaaaaatgattaacgaacaaatgtcacacagcgaagcattgaagattttgggcgctactggcgacgaatctaaagccgaactgtcaaaactctttaaacgtgcttctctgcgcaatcaccccgatcgtggtggtagcactgaactcatgcagaaaatcaaccaggcgtatgacgttgcaaccaaaacaaacagcgctggtaaaactttcagtgatgttcgcgcagaacacgcagcaaacaaaaaagcatgggaagaaaaatttgcagcgtatttcgcggttgcgaaaaactatttcagcacgaaattcaacgcgcaagaatttgcggaatatttcacgaaattcaccggacaaccaacaacctacacccagacaatcagcgaagttcgcggtcatacggttcacgcaacctatcgtttcacttctggtgatgcgttctttgacttctctttctcctgtcaaccgccgtcagaaggtaaaggtttagcagcgccggacgcgtccgcactgggtagcgtatcagttaatactctggttctggttggtacgaagaaacacaaaatggcaagccgtgattaccaatggggcaagaacccagacaaaatcacgccggaaagcctgttccctactaagaaactggaatccatctttagcccgactaagaaggatctcaagttcaaacgcgcggactacatgacatcctttgcccgtatcctgggtgcgaaggttagcggtaacgatgttattgttgatgttggacactataaagttcacttctaccgtcacgtattcatgcgtaaaggcgcgtatgtgttccagtatgttgttgacccaacggtgaacaaattcaaacctgctgaacgtctgaaaggtactatgctggaagatgaagacggtgcatgtctggatatgatcatcgacactttcaaagaaatgcagaaagtgaaaccagacgcaagcggcatcgcagcggtaatcgaccggatgaacgcagagtttgcagcggggcatcgttcagcatcttttgttaaacgtaccgcacagcaagcagcagctccagcgccggaagagaaaccaaaacgcaccgttaaccgcatcaataaagatgactatttcaacgcactgaaacaagcgggggcaaccttccgcagtaactacggtgagtttgataacggcgcgggtttgactttccacttcaaacgcgagatcagcaaccgtaaaggtttctggagtttcagcagctttgatttcatgcactccggtcagaaacatgtggaatggttgaaagatatcgacattgacgaggatagcaaaggcgcaagtatcggtttgctggttgataccctgaaacaacttcgtggtgttgctgactggtacacagcccgtaagatcctggaaggtatgcgtgataacttcaaggctggtaaattctccgcacctcatgtgaagaaagaagccgaacagaaacgcactgaaacgcaagctaaggacgagttaggcgcacagcctacgaaaccacaggcagcgaagaaagaatccccagcggttgataaggcgcatcaggcacagatggatcgtgagaagtcacagatgaatgcaaccattcgttctatgctctctgccctggttaaagccggacgcaaagacacaccggaagaaatcaaaaaagcagttgatgaagcaatcgctctttggcgcttgaaacactaactggttatgctataatgggaactgttgaaaagcagttcccttttttatgaggtgagtatgattattcaggtatcggttcagggcaacactctgacagtaacaaattccattatgaccgctatggctgcatgtcgtgatcatgtgatgtcaaaccctccggtaacggaaattctggaaattgatgtatgggaagacggtgtgatcgaagaatcctttggtttcactccgttagaggaagatttacgcaaaatggaacaatggctatggcaaactgtaccccaatgaaactaccaaaacacacaaccctgttaacccgcgaaaaacttcattctgttgaatggagtccgttagatgtgatggtgttcgatctggaatccaaaatcattaacgcgcatgttaacggattgagtatcttttctgttgaatttgaaaagattcgcgggtataatgaagcctgtaaagacaaattgcgtgtcatggttgaagctatgggctacatcgtgactattgaagacaacaaaatgtggattgcgctatgagcaaagtaaaagcagttttcgccgttggtcatgatatgtacgaagtggactatgctttcggttatgaacagggtttgccgtggggccactgcaaagaggatttgcagaacttcaaagcagaaaccgcaaatagcgtcctgatcatgggtgcgaacacttttacttctctgcctggtaaattgccagggcgagttcattgcgttctgtctgcatccggtcaacgtttggtaacgaagaacgggaataccgctgattacatcattcacggcggcgggttgtctgctgcaatcgacgtgatgaaagcaacgcatccagatcgtgatgtgtgtctcattggtggtaagtggttgcttctgcaagcaatcaataatacactggttgatgaagtggttgtgacccacatttacggacatcatgcatataatgcaccagcttttaaacgtgatgtttcgttcacggttcctgaattctgcgaagcggttctgaaatatgaactgactgatttcaaaattcaacagatcgaatcaaacgaacgagtcagaaaaattatcgtcgatcgacatacgaaaaaggcataaaatgaaacaatatcttgatatcgtcaacaccgttctaacacacggtactgaatcaaccgatcgtactggtgttggtacactgcgcatcttcgggatgcaagcacgttggaacctcgcagaaggtttcccagctactaccagcaaacagctattcttcaaaccgtgtaagcatgaattacaatggttcctcgaaggttctaccaacgtggaaacactgcgtaaaatgacgtggggtgaagatagcgataagcggacgatctgggacgataactacgaaaatcaggctaaagcgctgggttatacgcatggttatctgggaccgatctacgggcatcaatggcgctcatttggtgcggaaggttcttattatggtgttgaccagattaagaaagtcatcgaacaattgaaaaccaaaccagacgatcgcgggatcatcgtttctgcctggaacccgatggatctggatgatatggctttgcgtccgtgtcactgtttcttccagttcgtcgtaatcaacggtaaactgtctctacagtggtatcagcgttcagttgatgtcttcttagggttgccgttcaatatcgcctcatacgctctcctgacgcatattatcgctgatatttgcgggtatgaagtgggtgatctggtttggactggcggtgatgtccatatctacaaaaacgcagtagaacaagcgaaagagttgttgaagccggaacgcgcaccgcttccacttccgaccctttatatgccgaaggtaaatagcttacttgatttggatcaagaattctttgactccatccatttgaaagactataatcaccacggctcgctaaaagcagctatggcagtataaacaagggggcgaaagcccctttcttaacaaggtaagataatgagtgatattaaaacagtagtgaagtcttctggcgtaagtcaaacgttcgaaaaagaaaaactgttcaaagtccttaattgggcgagtattggaagaaatattgatgttaacgcattccttgaaagtgtcgttgacctgcttcgtgatggtatgactaccaaacagatccaggctgtagcgatcaagtatgcagcggatcgaatctccgcaaaagaacctgactggcagtatgtagcggctaacctcgaaatgttcgcccttcgtaaaaccgtttacgggcagtttgacccgatcccgttctacgaacacatcactaagctggttgaggctggaaaatacgataaagaaatcctgacaaaatggactcctgttgagattgattatctggaatcaaaaatcaatcacgataaagattttgaattctcgtatgctggcgttcagcagttgatcgggaaatatctgttgcaggatcgcacgtccggcgacatctacgaaacaccacagtatgcattcatgctgatcgcgatgtgtctgcatcaggacgaaaaacacgctgataaaatcagtcatgttgttgacttctataacgcgatttcggatcgtaaactgtcattgcctacgcctattatggcgggtgtgcgtactcctacgcgtcagttctccagttgtgttgtaatcgaatcgggtgattctctgggttctctgaacgctgttacgtccgcgatcgtgaagtatatctctcaacgtgcgggtattggtgtcaacgccggacacattcgcgctatgggttcaaaaatccgtggtggtgaagcagtacatacaggcgttatcccgttctggaaacacattcagacggcggttaaatcctgttcccagggcggtgttcgtggtggtgcagcaaccctgtattatccgatctggcatcttgaagttgaaaacctgctggttctgaaaaataaccgtggcgttgaagaaaaccgtattcgtcacctggattatggcgtacagcttaacgatttgatgtataagcgtttaatcaataacgattacatcactctgttcagccctgacgttgcgaacgatcgcctgtatgacgcgttctatcaagcggatcagactgagtttgaagaactgtataccagtctggaaaaagacccaacggtacgcaagaaacgcatcaaagcggtagatctgttccagttgcttgttcaggaacgcgcacagaccggacgcaaatacattttcaacagtcatcacgtaaaccagcagggtagtttctctgttccggttcgtatgtcgaacctgtgctgtgaaatcgcgatcccaacttcaccgctggatgacgatgataaactggctggcgaaattggactgtgtacgcttatggcgatcgttctcgataatgctgatataagcgaattcccagcccttacacgcatcgcagtacgcgcactggataacttgcttgattaccagaactaccctgttgcagcggctctgaaagctaaacagcgtcgttctctgggtgttggtatcaccaactatgcatcctggctggcaagcaactattgcgactactccgaagcatatgccggaaacgttcatgagttgatggaagcgtttcaatttaacctgctggttgcctctatggaactcgcacaggaacgcggtgcatgtggactgttccacgaaacgaaatatgcacaagggctgttgcctattgactggtactgcaaaaacgttgatgaactggcatcacctgtgtataactgcgattgggaatggttacgcggtgaaatcaaaaaacatggcttgcgtaactcaacgctttctgctttaatgccttgtgaaagtagctcgcaggtaagtaactcaaccaacgggattgaacctccgcgcggccctgtgagtgtgaaatcttcgaaagaaggttcattcaatcaggtagtaccaaaccagaataatcagattgacttctatgattatctctggacaatggcaaaacgtggaaacaaaggttatctgtcgcacgtagcggttatgcagaagtttgttgatcaggctatctctgcaaacaccaactatgatccggctaacttcccagatggtaaagtgaaatctgaaatcatccttgaagatctgctgtatgcaaactatttcggcatcaaaacgctgtactaccacaacacccgcgacggtgcaggtgaggaagaagcggaagattgcgaaggttgcaaaatttgattcaatgccccttcgggggctttttataaggtaaatccatgttaactgtaatgaacacaaacccagatcacaaacacttagaacagcctatgttctttggtgaggatacgggcgtagcacgatacgaagaacagaaacaccgtgtattcgaaaccctgactgaaaaacaactgtcattcttctggcgaccggaagaagtggatctgtcgatcgaccgtatgcagtacgcgaaaatgccggaacacgaaaaaatcattttcgattcgaacctgcaatatcaaaccctgttggataccattcaggggcgcggccctaacctggctttcctccctatcgcttccgatgtctcgatggaaacgtggatcgaaacatgggcgttcagtgaaacaatccatagccgcagttatacgcacattcagcgcaacctacacatcgacccgtcaaaagagttcgataaaattctgcgcaacgaagcgatcatgaaacgttcggcttccatgacaaaatactacgatgacctgatcgcagaatgtcacgaactgaaaaacattgtgctcaaaatcgaaatgttaacgtcccacggatacccagacgaatcgatcgcagagtacgaaaagaaacgcaaagagcaaatgcgtaaatgcaaaatcgctctgtatctgtgtatgcacgctgtcaacgctctggaagcgatccgcttctatgtgtcgtttaccttcacgttcaactttgccgaacaaggtaagatggaaggtaacgcgaagatcatgcgtctgattgcccgtgatgaagcacttcatcagaaaggcactcaaagcaagatccgactctggcagatgggtaaagatgacccagaaatggcggaaatcgcttaccagtatgaagaagaagcgacaaagattttcctggaagtgtacgaacaggaaaaagaatgggctgaacacctgttctctatcggtgatgtagacggcgtatccctgaaaagtacgatcgcttatatcgaacacctgacagatcagcgtatgcgcgcggttggcttgcagtctccatttaaaccaacgccgaacccgtatccgtggatgaacaaatggttgaagtctgacaacgtacaggtagccccacaagaagtagaagtgagttcttacctggttggcaacctcaacaccgagatcagcgacgaagcctatgcaaaatggcgacaaaaatacgcttgattgtcgcgtcgtaaacaagtataaaggtagttgggatgtcgatattcagagaggtacgaaattcggtaatcccttctacaagggaacacgggctgaaaacatcatgaacttcatcccgtatttccaaaacttgattcgaactggcgtgatcacaatcgacgaactgaaagcattggacgggaagcggttaggatgtacatgcaaacctctaccgtgccacggtgattatattgctcactgcgtcaatgtgttgaccggaaaggtgaataagttggatatataatggacgatgtaacatttggtgtaatatttcctttgcgtctgggttcagacaaaaggatagaccggagttttgttaaatgtggagaattccggcattgtgtgtattttattgaaatcgacggtcggatagtgtatgttggaaaatgtcgtgatttgtggaagcggttagacacataccgcaattcgaaatactggcgggaagcaaacccccagtaatattctgaaaaccgcacgtctggaaatggcaatcaaaaaacgtaagcgtgtaaatcttatcgtgacaacacacgatgaagacacatatcatgattttgaaataaacatgatccgaaaaatcaatcctgaatggaacaaacagcactatgacaaagctaaccaaaaatcagaaa

SEQ ID NO: 35 - DNA, 178077 bp, Unknown
  source: /note="Description of Unknown: KP2W-M0107 Bacteriophage sequence"
atccttcggtaaagggtatgcgtccgcattcacagagttaaccaggtgttgccattgacgcgtaaaccagaggcggtcatatttgtctttaggtatgtgacgacctgcaacatacttaacgatagggtgattttctggcaacgtgtccagacgttcgcagaactgcaattcaggaatatatttcttttcttccttcggcggttcttcgtgcgtctgttttaaatctttacgatccttgaaagattccatcaaatacgcggtataatcatccgggtaatagtctttcagaaacacagaaaacggcttgctgtagttgcagttaaaacaaccacacatcatgtgtgtgcctcgttttgacgggaatatccagaaacgttttttgtgcttatccttcatggagtcgccacaaatcggacaacgggaatggatactgaattctccaccccgtcgaacgatttcgctttgtggtaatgatcccatgatacgagttgcgaactctatatcaagatacatgtttacctctatcggctaacttctttctctgtgccgtctaaagtgattttccattcatagaatatcttataaaacggataaggtctaggaatatcaacacccgatgatgtttttctttcgttcgtgtacacgatcgctgtgtcgctcatgtacttgatacggataggaaaccaggtgtaattgttcgcagtaacccagatccgataattcaatggcggtaatggtttcattcttcactcttcatgattttacgtttgcgtttatgcggacgtgtagaacccagaaccttcggccctttgttcgtgatcgcgcctgtagtcacacccgaagcaatattatccacacttccgcctgaatcacctgcaaccatttcttcgttgagtctttcgcgaagttctgggaggttcatcatgatttcttcgtgatcttgctcggtcaggttccagcggctccgtaacgagtcataagcacttgtaaggttcatgaacccagacatataaggaaccgcgtttaaacggcgcttgatgtgtctcacagagcgatggaatggggaatatgcttccagttcttccttcgttttcgggtttttcaatacttccccttgaccgtcgatgatacccagcttgtaagccgtccattcagtccagggctttttcagtaggcgaatcattcgcacactgtaggttaaatccatgtttttgattaattgatcgctcatagtctttactctattgtgaaagtgaaaaggttttgcgcgggttctggctccggttcggggaattccatacagacaacttcacacatcggtttcacgcctttccattcttccagataatatccggtatcaatgccgcaacctggttgcatttcaaggccagtttcatcaagaaactttttgcatttcgatgttgtcgttgattcgtcctgttggaaataacgccgtccagagtaacgaaaattcgcggacatctgcgggagaatgaacgtacccgcacgggcaatctgtgaagcacgttcaatcactttatattcaaattccgcgcccgtatacttacccttaaaattggatgtctttatcttgccgaaaggaggattgctgatcgccatatcaaacagagtatcaaactccgtcgttaacgcgtctgcgttaatccaggtcgcttccggtacgatacgcttacccaacttatagtatgtatggtttaactcaacacagacgatttcacgcggtttggcgtacatcatcatatgaatcatcgcgaaggatagtccaccgatacccgcgcacaggtcaacaacgcttccactggtacaagcatcaatagtgaaatcgcgagcaagtccgatcggggtaaagaatgcacccagttcagagttattcgtaaatgcaccttcatggaagttttcgataatgaataatttttcgtcgtaggttagcgccttgtcagactccaccagatccattatcttgttgtgttgcttcgtttccgctttcgttaactttgccattgtcccagctatacagtaatgttgattcattagggtagaattcccacccgtccacgtatccggtttcccagtcagtagtttgttcaaaaccacagatccattcgtacacacctggcggcagttctacggaatcaggaagcccgatatcttccgcactgcgtccacactcaaaaaatgcatcgtgaatgaacggacgagataataccgtaacataaccttcatcgtcaacagctacgatccagcgcgaactgtgaggactatcgaacttcggttcttcttcgtctgcatcagcttttatttcagccttacaaaaatctaaattcatcatttcactaaaccttctttaacgccctctttcatggctttcagaacaccgataaaagcgtctttgccaccgatagcgccgatgataagcatcaggacaccaacacaacccgccaaaccgattctgaacaggttccatgcaaacgggatagccagaagcaccaaccacgggaacggaaatcccataagtgcgtttagaaccagtaagataaaagcgattgcaagtttcatgatgtcctcctttgtttgtttagaataaggtatcacctttcgtgaaggattgcaatacctatagatacaaaaaagcccctttcggggcttaatttttatgctttgttgataagataccgaagaacgtttttggcctgaacttcgttacagcagagtttgaattctgggtcgattgggaggaagccccagaggaaatcaacgctaccttcaacatctgctttcccacttttcagcatttcaaccagcaaacctctgtttactacgctgttcactactgcatcgaaataacccgcgctgaaatccagttctgggttcatcacttcgtcgtatgggttgttcagtaagttcatttggtatctcctttaatccgtttcgttgtctacgggagtcatattatcacaatcataactcccgtcaacccctaatcaggattattttgcgttttttgcaatccagagagtcagtttagggaatacatttgccattgccaccacaaacagcacccagaaagccagcttaatcacaccgatcacgatcagaggtgcaaacacaagccaccatgaagcatttgccataaccccgattgctgccagtttcagagacaggaggatcaggaacacaataacgagaatctttttcatttcactatacctttggagggggccgaagccccgttaaaattgaatgtctgtactgtttgctacttcggctaacttactgcttcggttagtctcggcttgttttaccatagcaccttgtgcttcttcaagcgttttcggcatctgacgacctttataatcagattggaacccgatatcgctgttgtcggtatccatccagcgttgattacccttgcgcacttcgagtttgaagtggttaaagtggttcttatcgccgtaacgggatttgatctgcttgaacaactgcaatccctgatcagctaactcgtcggtctcaatcacagctaacataaagtcagcggtagctggaagaccagcagattcggcaacgtcgcccatgctgatatcagaagcatcccacgcggcgcgggtagtctgcgcaccagtccacattacggtattcgtttcaacagccaaaccgcgaagttcttcggcaatcgctttaaccaggatgtatgtgttttccgccccgcgtacacgggtagaagcacagatccccaggtagtcaacaataatcacatcaggtacgaaactcttcttcaatttaagctctttaatcagcgctttgaagtggttcgcgttcgcccctgctgttgggtattgcttaacgattaaacgcccgaccttcgactgtttgaggcgttccatacggttcttatagtccgcataggtgatgtttccgttgtcgatatcgtccatcgcaacatcaagcaggttagcgtcaatacgtttagaacaaacgtgttcagccatttccatactgatatacaggacgtttttacctgattgcaggtaatcagcagcgagagaacaaagccccagagatttaccaacgttaacaccagccattaagatgttcaatgttccacgttctgcgccgcctttagtaatggcgttcaggatcgggatattgaaagcaatcttcatcgctttggactggtaaagcatccagcgtttttcatagtcttcgaagtaatcatgaccgaccgaactatcgaagctaatcgctaacgcttccgccatgatgtcagggattgccccaacgtcagggattttgttgttgcgttcgccagcaggtttttcagcattcgcctggatctcaattgcacgggacagagcgcgatacattgccttgtcacgacaataggtttccgtttctttcatcaaccattccagatcttccggcgcatttttcatgctgcggatcatctttttggtatcttcgtagactacatcactcaggctctttttgtccagagctacttctaaagcagtttgtgaaggaatgctgttgaattcctgtacgtgcttatccatcaaatcaaagagaatctgcgcgttcccttcgaaatattcacggcgtaaatggggccacgcctgaacaaaatacgtaccattaaaaaccagatttgaaaatattgtttcgacgatcattattacctcttaaaccagattagcgaacatctgaaagaaattatacagctttactttcaacgccgcccataaggtcttttcaggctttgggagattgggcttgatctgcgcgtagattgcatcgtgaaccagcggaatcagtttttctttgtcttcgtccggcgtactaaattcgactttcaggccgttatcccaatacaccttatggatgtacactaagtgtgcaacatcgttttcatcgttgatcaacagttcttgaataacgtcctgcattgcttcatcaagaatgttttttgttttttgttcaatgtccatgattcacctattaaaagggggcaaagcccccagttgtttattactcttctgacatatccacatcatcagggatatcgtcatcgagatcaaatttatttgacggttctacttcatcgtcagaataaagatcttcgagtgctgccccgtcagtgatctctttgtcaggaatacggtacttatcctgaatagcatcaaggaatggttggtgagtgaacagaggtttccagaactcaatagagttggtttccgattcacgccatttcttttcttccagttcaagttcgcctgtttccgtgttcaggaacgcacgaccgcgccagcctttcgttggagtctgaacgaagttcatttccatagccagatccagaagaccagagaacatactgataccgccctcataggtaacatgaagcgggaatttggatttctctttcacgaaacgagatttctcgatgttcatgatgaagtcataaccgacaacttccgtaccttctttcacctgctgtttgcccaggatgatcgcggtgtctgcggaatacatcagaccagtaccaccggaaatgactttcttgctgtacatttcttgtgtgtcgtatgtgtgacagatacacaccattggaatatccagatccgccaggtaaggcgtaaccatacggaacatacctttaagtgctttagcgcgggtcatgtcctgtttgtcgttgtcagacagggcatcagccagttcttttttactcgcggtgttgcctacagagtccacgaaaatgatcactttgtcgccacgttccagcgcgttaagctggctcacaacgtcatttcgaagttgctcaactgtcgtgatacgagtatacaccacacgatctgggtcaacgcccattgatttcaggtaagacttagttacgcctttctctgaatcgtagaacagacacacagcatcctcattcgctttgaggtacgccgcaaccgtcaccagccccagattcgatttaaagtgttttgacgggccagcaaacagagttaagccggaagtcagaccaccatcgaaagcgccggacagcgccaggttcaggatcggtacacgggttcgagttttggtgatgttattgaaaacatcgctttcagatagaattgacgcagattgactattcgagtttttgatcagttttttcaggagtgctttattagacatttatttttccggtttatatacacgcataatattttcctcacaaatttatataaatggggcatttctgccccgtcaggtcttaccagtcatcaccaaacagagtgttcagggatgcgcgtttttcgtaatcaattttacatgcttccgtgatgttttgcaacgggctaatcacatgtttttcaaataatccgccgtagtctacccacttcaaaatatcttcttcgatctcagttggtaaacgcgtaccggattgccatgcaatgcaatcagcttgccacgggtttttatctcgcaacggcagaaccataaccttttcaccttccataatcggggtgattccttgaataccctttgtatggcggttgaagaacagaacgcctttgatgtggtttggtgtccctttgattgggtatccaaaatcatcacgatattttgagatattgttagcagatgatacaccagctatttctcggtagtcaagtgccttatactcttcctcaaatactttgaagtgttcgtgtaaggattcttcaccttcttgcaggatgcgacggatcgcttctttcaagaactttttaaccgctgtcggtgtactactgcgctgggtttccattcccatgatctttaatttaggcttctcgtaacgggttccttcggagtcccacacgttagccgcatatcgtttctttgccgtccagaaactacccagacctttcgatcccagtggtggcccagaaatgatttcgcgatccataaacatcagatgttcgacgttgttcatgtactcacacagttcgcggtagcccttatcaatgataggttccatgcgttctttactgaacttatccaggaaatcaacccaatggttgttatccctgaacttgctttcaccgccgactttcgcgatcacgttatccatacaaacataaatggagtcggtgtcacagtagcgcacgtatgcgtaatccgtggtgttgcacagttcgttaaggtattcgttaaccttacgttcaatccactgaatagccaactgaccgaacatggtgatcgcgcttgcgtttcgaatatcgaagtaccggaagtgttcattacccaacgcaccataaagggagttgatactgattttacggttaagctgtgcggtgtttgcttgtgcgatcttcttctcacaaactttcttcacggctttaagcatttgcttagacagcgttttcagtacagcttttgattcatcactgaaatcttcgtagaactcgaaatcagggttgatcatttgattgtgcgcgtccgtcaggtgttcaagttcgtgcttaatcagttcgagatttcgctcacccgccatcattcgttttttccacgtcttacgctgatcaaatactttcttgatctcgaccggaatcacgcctttaacatcgcgtcggaacatccacccgttaggagagcagctaaattcatcgctagggcgcggcgcagtcttattgatgtattcgtgcatcggacgcactgcaaagctgttagcgattgtctcagggcttatattcacctgtcggatgatagatggatacagactggttaagtcgaacgatacaatgtaacggtatggagcgacaacaggatctttaacgtatgcaccatcatactgcgttttcgtgtggcgtttattttctgggattactttcttctcttcacgcagagagttgtaaatgatcgcgtcccacgttttaagcggagacataaccccagggaagtttattttcgcatagtacgctacagacagaaccagttcgataaagttgcgtttcccgtcgatatccaacacgcggataacgtcaacgatgttatacgtgatgtatttctggtgatccgcttgacgcagttcagacagtgaaccttcgtaatcaactttgtttttgcctgtttcgaactcagcgattgcgcccagagcgtaagacggttgcggggtgaaactgaatttcttatagagatccattccatccatttgagaaacgccgtaaatctcgtatcccagttgttcattcccataatggtcggttgttgtcttcgcagtcactttcccgaacgggctgaaatgacgaacaacgttttgcccgaagatgttcaggtaacgggtgatgatatacgcgatatcgaatttgttcgagttccagcccgtaacaataacaggtgtccgctctttccagtctttgatataagccgacatcagcgacttttcggtctggaatgaacggtaaacaattttcttcaaatcttcttcgctgatctctttttcggtatcaactttcgacgctacccactcgtctaacccgccctcgaccagatcatacacaaagaatttatcttcaacgctgtcatagtgggtgattgcgtcgatagcatattttgcttcgcgtggatcagggaattcaggcgcggtaacttcgatatcaagtgaagcaatgcggatcttgtcgcgatcgtattcgatttcctttctgtaggaatcggagatatacgccagcctgaaatcatccatgcctagcgcttccatgcctacatctttcattcgctgcatccagttttttgcttccttgatgctttcgaagttctttttgatgcaggtcttgccgtaaatgtcgcgatatggcgagtctacacccgccatagcgtgttgaaacattgtaggcgcatattttgttttgcgaacctgttcgcgtccctcagagtcaatgaagcgctcgtagatgtgatcgcccatttgctcaacggatagataaaattcattcattacggttttctttctccgtgtttaatcgtgacaggaatgataccccagccagcttgatcagatcaagcgagcgttgcgctaatttgtgatagcgttgggtgtcaggccgatttagttgttcaaccagcacggtatattcttccatgatgcgggtatagaacttagggaagtgatcccgcgcgtatgcgtaggtgcgcagatcagagagattgcaagtaagagacagtttgatgtcttcgctatgcagacggttgatcaagtgatcaccggattcaatagctttgatgatttcttcaatacgaattttcataatttagtcctcacaagtggtgtacaaccaatataacaaagcccctgcatttctgcaagggcttttgattaatgtccgatccggtacttgtatttcaaagtccattcagctttttgtgcgtgagtcaatacgcggaagttgttctcttcggagaatttcagatccggcgtaaggatggaaaccataccccactcttccagaagtcgcgcaatgttattgcggcgcagttcgtcatcttcggtcatgtcaacctggcgaccgtccagcttcaacagttctttgaagtgtacgataaaataacgcccttgtttctgtaggatgtggcaagactgccacagcattttctttttgttatttgcgatcccgatacgggtcagcgtttcgcgaattttcaggaaactgtcatcgctggacagtttaatttcgagcatgttcatacatcaccatttctttattagttgttcaacctttttctggtcggttttatttttcacaacatcagccaacacagataaagcaactttcatatttttccgcttccactcgtccagtttttcaagctgtttgagttcttcgtaatattccattgctatacgtgtatttacaccgtatcgtttttggagaacatgaaggataactttcatttcgttatcttcggtgagtttagcccacgccccgaaccgcttacctttgcgcaccgtatgcaggtaataatcaaagtgcgcctggtctggtaaaccggaaccgatcatattcatcgtgtatgcaggtatcagcgtttcgatatgctggctcattgcattgtcgatgaaaaacttatcgtatgaatcaagggcagagatccgtaatggtgtcttcccgttgttcagttcttcgagcaccataaacaaggtgttttccttgtctttggtgtactctttcacaagttcttcgatcttgtcccagtctttagaacgccaggccgcttcatgttcgttcagttcttcttcatcgagaaaagcagccagtgacatttttaagcctcccacgcgagggtaagcattaagcccatgaacaggtattgcaggtgaatctctttgttcactgccagcccgtactgtgcgttgttttcgcctactgcctgaatgagtgcaaccttagattcgttggtgacgatcgggtataccgcatccagaagtttagccaggaaagtttcatactcaggcgcgtacttgattgcttcggctcgcagtgctttgaagttcttcgctttaagcccctcaatcactggtgtgatgtccgaaccaacaatctcagacagaataccagcatcaattttgccacgcttagaatagaacccaagagctttaacgatggatcgcgcgtctgggtagtgcttcttaacgaatccggcgatcacctgctggtcatattcgattttctcgatttcgaggataccgaaacaacgtttgatcatttgcttcatcagttcaacgcgttcttccttcgacggggaaccgaacttgactaccggacagcgggagatcagcgcagggtgaatcccgttgatgttgttcgcggtaatgataacagtaacgttcttgctgtacgcttcgataaagctacgcatgtgcttctgtgcttctgccatgccagggcgatcgaattcgtcaatcagaatgattttaccgcctttcttctgcgtcatagaggacgcgtaacgatccagttcgttacggatgaagttcacaccacaatcggaaccgttgacaaacatcacttccgcatcaacttcgttagccagaaccagcgccagcgttgttttacccgtacctggggaatcagaaaccagagtcatgttgtcgatgcgtccagacttgatgaagccgcgcatcgtcgctttatcagcagcagggagaatgcattcatcgatcgtcgtcgggcgatagcgctgatcccatgcgaattcttcgggagactgggagattttgccgtatttggtttcgattaactgtacgttttcactaagttccataatattaccttcaattgattatcaaaaaggggcttaacgccccttgtgtactactttgtttatcttacttgaactggctggttgcttcaagtaccactacatacgcaacgccgttttcggacgagaatttcgcagcgccgcgagaagagatttcaactttgtaatcgctgttgatgaactgcatgttgtcaatcttcatatcgaagttgaacatgttatcaccttcgtaatcgcccacttctacagagaaggttgactggctttctttacttttcgcggtgattaccagcttaccgttgattggctcaacagacaggtcggtcagtttcatcatgcgtgacgctttgatcagtttttcgaaatcgttcgcgctaatctggaaaatcagatccgcaactggcatttccagacgcttcttaggctgtacgattgtggttggatcgcttgaacgctcaacgattttcattttctcaccacgaatgacgatttcgccagtggacagatcgtgagttacttcggcatcagtgcctacaacgttcagcatgttcaggaatgagttcagatcgtagatacctacatcttcgtcaattacgtcagaaatcgttgcttctgcgtaaactacgctgttaatggatttcgtcataatgaacgaaccctttttcagcattacagatgggttgatctgggagaagtttttcaggatgtcgatcgtttgtttagagaatttcatattcaacctatagttttcaattaggcaaaagtgccgttaatcagggattctacaacgcgatccgccgcattgtcaaggaattctttgcttttggattctgtgattttcgtacccgcttcgcgagcgtcgtgaatcagtccggtatgtactgcgcttactgcttcgtcgatccgtttgtaatgctcaaagcgttcagcttgaggcatcgcacggaaaatctctttgatgttttccggcactttacctacccaggatttgcgaacgttgttcagatgcgctacatatacgttttgttctaaattcatatctacctcaaactttcaaaattgggggctttcgcccccgtaagcattacagatccagcagtttatccaggtcgtcatcaccggaaccaccttccaggtcaaacggaggtgtattatcatcttccggtacgcttccgcctacgttcagttgacttacgccaccagattctttagcaccgttggaatggttgccattatcgaagtttttcagttcgttgtcaaatgagttcagttctgaatccagatccacaccagcgcttgcgccagcacccattgcagcaccaccgaatactttggtgaacttcgcggtcagttccgcagttggtttgaactggtctggagcagtgattggacgcagatcgctcataccttcgaagatttctttctgacgcgcttcgtcttcgatgcctttgattgggccaggaacaccaaatttgctgtcgtcgtagttaggccagtcgcctactttcttcgcggtcagggtgaagttagcgccaccaaacggacaggttacagcaacacctggttcatccagatctgggttccccgcgatagccgcagtgattttatccatgatctttttaccgaagcggaacttaaacaccttaccttcgttttctgggtgcattggatctttaaccaccagaatgttcgcccagaacgattgtttacgtccgatcatacccagtgttttttcggcttcgctgcctttcactttcgctttttcgaacagatcgttttcagagatatactgacacacagggcaagcatcgtaatcgccgtgggtagacgggcagttttcgatgaaccactggttattctttttgaatgaatggttgacgatacgcacgaacgccagttcatcatcagatcggttaggcaggaagcggatcaccgcagaaccgtttttctgtgcatcgacaccgagtttccactctttttcatctttctggaagccggatgaacctttcagagcggcgacttgttcttgcagtttggttggatcttgacgtttaaagaatgacatatgttatttctcgtttaagttaattaaggtttgtttcattaagtttcggtattttacgatttcttcgttactgatttcaactaattttctgtatgcgtttagttttttgctaaattcattccagacgaaatccgttgcgatttcatcgtgtttatttatgatgtctaaaaacgagtcgaggatcaagaatgattcataagaaatcaccccagaaagtacgagcttgctgatatacgaggttgatgatttgacgctatactgaaacaccgttgagaggggaatacctttcatgcgggaaaattcatacaggttttttacatcgtccacgaaaatattatcaattcgcctcaacttgcctatgtattgacgataaaacacgatcgtatcttcgtctacatccccgacccagaagtcggggttagctaccatgttggagagaagtataagatatatttctttgaatgtaaacctttcggctaactttttgaaaaaatacttatctcttctcttttcgaacgctttttcagtgatctttatttcccatttgtacttgatcgcgtcatacttcccagcaaagtgatttttcatcaccagatacagtttgtataccgcgatcggtttcaaacgggaattagcgtctgaactgtcaaacggggttttaaatttcacatgaaatcatccagtgtttgcgtcgtcgcgtggtctttagccacagaaggacgcagcagattgtttttaatggcttcgtcgctaatcttgtcgatgatcgctttcggtactgttttggacagcatagcataatcaatgctgttttcgtccatccattgtaacgtagcttccatgtaggttgccccctcagaggcaaccagattttcgatatacaagccgacttcggttttgtttccgatttcgctcatattacgccttatcgatcacatcgtacagttcgataagttcgttgttctgttcttcgaacgcggtacgtgcctgttcgtgatacagtttgaacagcttgccgaaggttttaccgtcgataccataatccgttttcgctttggatttgatgtctttgaaagaaccctggaaatgttcgatctgagttttcacgttcgacgcttctttgatcagttctttaaccgctttagcgatgtctgggttttcttgcagtaattctacactcattttgttacctcaaaagtcacttagtttttcatacatacgggtgagtttgcattccatgaagtatttctccatttttgctttgttcccgatttttggagcattatacgcttcttcgattgccgttgcaacatctttcggaataaaatcaaagtcgcgaagttcttcgttttctctgtatcggatcgcccactcttcgggcatacccacggtcggatcgtccgcttccagccaggcttcgagttcagcagccctgatttgtggggcgcgttctccttcaaccttcgtaacaatatagtcatttcgcattttaatgcaagcgatactatcttttttatcgcccttgatgatcttcatgcgcaaatcgttacgaggtgaaccatatttcggtgtaacccatttcttttgggttggcgaccactgacgcacaccctgatatttttgaagggctgcaaagtcaccatcagcagaaacgatcaggacacgtttaccttcggataccgctttacgcgtcaccacaccgatcacgtcatcggcttctgcgaagtcaacgcggatacctttgtacggtaaattagcacggatttcatcgtatgtcgggtgaaggaaaccattcaggcgatcccagtcccaatcagatgcttcttgttccatttttcgtttctttttgtagtaccaggctttacttctgcgccaatacttgttatcatcaaaggctagaacaatttcagggtactcgcctttgaatttaaccacattgtgacgaatggtgtcaagcactatgtgacgaacaatttgttggttgatgtcattctggtctttcggcttgaagttgttcatcaacgttgctaccgaaaggtttgaaatatctatacacatcacatcaacaggatcatcgtcattgctcattaagctgttcaggttgaacatacttgcaaatgaagacatttcaatacctcgttgttgttgaatgaaactgattatagtgatcactttttcaaagtcaatagatcatttcaaaaatctgagcgaagcgaaggacacgaacgtagtgagtgtctatgtactgaatgtacgttttaatatttttatattttatatatagagaaaacagtacatttccgtatactttttaaccagtttaactatccgtttcgcttcgctcacggaagcgcttcgcgctgattttattaaataatatagattggaagtaggtttgaaacacctgattcaatcggctataatgaatgtattcaatttggagaatataatgactacaaagatttatgcagataatgataagctgtatccagttatgtgtaagtggaaacagcaaatccgtgaaactggtgatcgtaagatgccggatgaactcggtattgcgattatgaacattgctcacggtttggcacgtcgatacaacttcaaccgttattccgaagactggaaaatggatatgatcgacgatggaatttcggcaacgatttccggccttcataactttgatgaaaccaaatatacaaacgtctacggttacatcaacaaggcttgctggcaagcgtttgtaactcgtattctctacgagaagaaagagaacgcgaagaaatacaaatacttcctggaacatgtctatgacagcgatgatactgatatgaccacgatagccgatgaaactttcattcaggatatccatgacaaacttaatcagtatgaagagtccgcgaaaaaacccaaagataaaatcgaggttgtggacgaatcgccaacattggaaatgtttctatgaaaattaaaattgacctgaacaaaattttagcagatgctaacgacgaaattgatctgcttccttaccttgtgaaattagagttgcagaacgtcggggttccgattatcatcgaccctacagatgtacgagatccagacttccagatagcagaaggtcgtctggactatgtaataaacgccgaaacaatgatcatggagatcacctactatgaacgtgcagcatgaagtaatcgacgaagtacaccaaaaatcagcgctggatcttcgtgaagaagaactggaatccatcaagggtacacgcattgaacaggaagccctacgcaaagcacaaaagttcatgcggaagaacaaagcggaatggaagcgactgcataaacacgcagagaacgcactcttcgaaggtaacaaagagcagtacgtatacgcgatcaaaaagatgcgtgatatgctcaagcaaccatacaacgatgaactgattgaaacgatgtggatcacttcgaaccagcagttgaaagacctgttcatcatggcttctgaaaaatacggcaaataaaccccttcgggggttttgaggtttatatgaactatgttttaattggggatacccatgccggacttcgccaggataacccctggaacgaagaaaacctgtatacggtattcaaacagatcgtagagtattgcaaagaacacgggatcacgcgcggcttccatgctggcgacttcttcgacgttcgaaaagcaaccacacaaacgacaatgaattttgttcgtgaaaagctggttcctcttctgattgaggcggggatcactctggatgttcttgtcggcaaccacgattgtcaatttaaggacaaaatacgccccaacgcgccacgcgagatactaagtcaatacgaatgctttaatgtcatcgacgaaccgaccacggttgatttaggtggcggaaattcgattgacctgatcccgtggatttgtcaggaaaacagccagcgtatttttgactacatcaaacaatcgaaagctaacttttgtttgggacacttcgaactgtctggttactatttctacaagaacagcaaagccgatcatgggctggaacctgatttcttgaagaagtacgatcgtgtttactctggacactatcaccacgctaacgagggtgataacgtgttttatatcggtacgcctctgactatgagcgcaaacgacgaagacgaaacacgcggattctatgtgttcacgggcaagcctgaattgactttcatcgctaaccctgtgtgtcaccatcgccggatcatgtatccagcacagaaagatgttgatctcgaacagttccgcaactgcgcggtgcgtctgattgtcagtgaaattgatcaggggcttgcaaagttccaaaccaaaattgaagaaattgcctatgaaatcaatatcatagacaaagttcaaacagattcggatgtcgataccgactttgaaatcaaaaccgttcgtggccttatcactgagtatatcgccaacatgcagatcaccgacgatgaaaaagaggaagtgaataagctgatcagcgaactatacgcggaggtgtcaagtgcatagccgttatgatgaatatttcggggaaaatccccgatattctcacctgttgcgtatgttgggaatgaaacacatcatttccacatccgacgaagcaggggaaaccagcgcagtttgtttgaccatcatgaagggtgcatggcattcatcacgaacatggtcaatattcatgcttgatacactggacgacgatactctatcatatagtattgattcatcagttgttcaaatgatcactgaattatgtgaacggattttaaatgaaactaaacttcaaaaaaattaagtatcaaaatattctgtcggttgggaacaccccgatcgaactggaatttgatacggcaaagaaaaccctgatcacggggaaaaacggtggcggtaaatcgacactgatcgaggcgttaacctatgccctgttcggtaagtcattccgcgatctaaaagtcgggcagttggtgaacagcgtcaacaaaaagaaatgcctggttgaactggaaatcgaatacgggaaagactcgtacaaagtggtgcgcggacaaaagccgaaggtattcgagatctggaagaacggcgagaagttgccggaagactccgcagcgggtgattatcaggcacagcttgaatctatgctgaacatcaaccttgtgggcttcaaacaggttatcgttctgggtacagcgggttacactccattcatggaactgaaaacccccgaacgccggaaactggttgaagatttgctgtctctgtccgtcatcagtgaaatggacaagttaaacaagtcatacattcgcggtgttaatcagcagttggatacactctcaatgcagggtaatcacatccagcagcagatcgcaacacaccagcgcttcattgacgaacagcgagcgaaagcaaaccagaacaacgcccgatacaaagagatctacgatagccacgtagaaaccgcaaagaacatcaaagcacagcttatgcagttgcaagcggagattgcggaatcggtgatcactggagaagaccggacggaagatatcaacaaactccgtgacggttattctcggctctcaatgactgtagaacagtttaaaaagctggaggtgatgtatcagaaaggcggtgagtgtccggcctgtaagcaagcgattaaacccactcctgagcgtatggcggagatcgcagagaacatcaaagcgggtacacagcgtttaaccctgatcaaaaccaaacaggacgagttacaagggatcatgaatgacttgcttcaacagcaacgcgcactcaatgccctgaaaaccaaatatgaagccctgaaaggtacactgcaaaacgaagttgccaacgctaaacgcgcacaggcgatcatggaacaggcaagcgcggaagtagtcattgatgaagaacccgtgaagcagttgcaacagcaggaagcagaactgaacgaaaaacgacaaggctacgtcaaggaaaaatatattcgtggtattgttacggatatgttgaaagattccggcgttaaagcgagcatcgttaagcgttatattccgtacttcaacaaacagatagcatattatctggatctgttgggtgctgattatcagttcactttagatgacgagttcaacgaatcgatcaaatcactggggcgcgatgatttcagttatgcgtcattcagtcaaggcgaacgcgctcgcatcaacttgtctattctgttcacatggcgtgacgtgacaagtaaagtatcaggcgtggatctgtctctgctggtacttgatgaatgtttcgacggcccccttgacaaagacggctcttttgctgtaaaaggattgcttgatggtgttaacgggaatttgattgtgataagtcatcaggatttagatccagaagattttgaccgacacatcgttatgtcgaaggtcggtcgattctcgaagatggaaatcaagaagtcttaaacttgcagttgtcaaaatgccatcgtttcatattggtggcatcaccaactttagcgcaatgggggcaagttaattgctcccttttcttttgtgtttttctgtctgggttctgagtacaatatggaatatgactgttcaagtaatgcactgtcgattctgtaccgcaatgaggacaagaaccgcgctccgatactacgttgctgtttttatgtgctcgcatgactcctgcaaatgcattcactttcccttcattgcctggcttgtgcttgcagttgtcgaagtgccagcggttcatattacctactaagccggacgtattgcaatgaggacacgtaaccctgttctgttgaagtttggcctgtctcatgcgtaagcgtgtctcttcgctgaactctttttgtttctgggcttcaagtgctttctctttcaaccatccatagcggcggtttgctgtacgcgcagacgatcgagaagtaccgactgtaagcatgttagcagcataaattagtttatggttgcctggatacatcttaactaatagcagatgtgctatgaagtgttgacgtgctgacagttcaaccagattttcgggatcgtccgatcctcccatacattttggaacgatgtgatgtttctctttgtattctgcatccgttccggtagtcatgagttgttcgtaaatcttatgataattcatgatgataaatcctgtttgatagtccgctagatacccctatttaggaacatgattatgttagaaagagagtttgaactgataacaaccccagaaattgagaggttttatctccacaacgagttacacgaaacgaaacatgtagttacaatggcagatgttgaggaagcattcaaggataaccccattgaattgacccgcatcaagaacaataaatcttcggtgtggttcctcgaaaaaatctattgacagcaaaacataaataccttaaagttgcccgtgtactgagttacatgggcttttattttgaggaacggaaaatgattaacgaacaaatgtcacacagcgaagcattgaagattttgggcgctactggcgacgaatctaaagctgaactgtcaaaactctttaaacgtgcttctctgcgcaatcaccccgatcgtggtggtagcactgaactcatgcagaaaatcaaccaggcgtatgacgttgtaaccaaaacaaacagcgctggtaaaacttacagtgatgttcgcgcagaacacgcagcaaacaaaaaagcatgggaagaaaaatttgcagcgtatttcgtggttgcgaaaaactatttcagcacgaaattcaacgcgcaagagttcgcggaatacttcacgaaattcaccggacaaccaacaacctatactcagtcaatcagcgaagttcgcggtcatactgttcacgcaacctatcgtttcacttctggtgatgcgttctttgacttctctttctcttgtcaaccgcctaacggtcaaggtttagcagcgccggacgcgtccgcactgggtagcgtatcagttaatactctggttctggttggtacgaagaaacacaaaatggcaagccgtgattaccaatggggcaagaacccagacaaaatcacgccggaaagcctgttccctactaagaaactggaatccatctttagcccgactaagaaggatctcaagttcaaacgcgcggactacatgacatcctttgcccgtatcctgggtgcgaaggttagcggtaacgatgttattgttgatgttggacactataaagttcacttctaccgtcacgtattcatgcgtaaaggcgcgtatgtgttccagtatgttgttgacccaactgtgaacaaattcaaacctgctgaacgtctgaaaggtactatgctggaagacgaagacggcgcgtgtttggatatgatcatcgacactttcaaagaaatgcagaaagtgaaaccagacgcaagcggcatcgcagcggtaatcgaccggatgaacgcagagtttgcagcggggcatcgttcagcatcttttgttaaacgtaccgcacagcaagcagcagcgccagcgccggaagagaaaccaaaacgcaccgttaaccgcatcaataaagatgactatttcaacgcactgaaacaggcgggggcaacattccgcagtaactacggtgagtttgataacggcgcgggtttgactttccacttcaaacgcgagatcagcaaccgtaaaggtttctggagtttcagcagctttgatttcatgcactccggtcagaaacatgttgaatggttgaaagatatcgacattgacgaggatagcaaaggcgcaagtatcggtttgttggttgataccctgaaacaacttcgtggtgttgctgactggtacacagcccgtaagatcctggaaggtatgcgtgataacttcaaggctggtaaattctccgcacctcatgtgaagaaagaagccgaacagaaacgcactgaaacgcaagctaaggacgagttaggcgcacagcctacgaaaccacaggcagcgaagaaagaatccccagcggttgataaggcgcatcaggcacagatggatcgtgagaaatcacagatgaatgcaaccattcgttctatgctctctgccctggttaaagccggacgcaaagacacgccggaagaaattaaaaaagcagttgatgaagcaatcgctctttggcgcttgaaacactaactgattatgctataatgggaactgttgaaaagcagttccctttttttatgaggtgagtatgattattcaggtatcggttcagggcaacaccctgacagtaacaaattccattatgaccgctatggctgcatgtcgtgatcatgtgatgtcaaaccctccggtaacggaaattctggaaattgatgtatgggaagacggtgtgatcgaagaatcatttggtttcactccgttagaggaagatttacgtaaaatggaacaatggctatggcaaactgtaccccaatgaaactaccaaaacacacaaccctgttaacccgcgaaaaacttcattctgttgaatggagtccgttagatgtgatggttttcgatctggaatccaaaatcattaacgcgcatgttaacggattgagtatcttttctgttgaatttgaaaagattcgcgggtacaatgaagcctgtaaagacaaattgcgcgtcatggttgaagctatgggctacatcgtgactattgaagacaacaaaatgtggatcgcgctatgagcaaagtaaaagcagttttcgccgttggtcatgatatgtacgaagtggactatgcgtttggttatgaacagggtttaccgtggggccactgcaaagaggatttgcagaacttcaaagcagaaaccgcagatagcgtcctgatcatgggtgcgaacacttttacttctcttcctggtaaattgccaggacgaattcactgcgttatgtctgcatccggtcaacgtctggtaacaaagaacgggaataccgctgattatgtcatccacggtggcgggttgtctgctgcaatcgacgtaatgaaagaaacgcatccagatcgtgatgtgtgtctcattggtggtaagtggttgcttctgcaagcaatcaataatacaatggttgatgaagtggttgtgacgcacatttacggacatcatgtatataatgcaccagcttttaaacgtgatgtttcattcacggttcctgaattctgtgaagcggttctgaaatatgaactgactgatttcaaaattcagcagatcgaatcaaacgaacgcgtcagaaaaattatcgtcgatcgacatacgaaaaaggcataaaatgaaacaatatcttgatatcgtcaacaccgttctaacacacggtactgaatcaaccgatcgtactggtgttggtacactgcgcatcttcgggatgcaagcacgttggaacctcgcagaaggtttcccagctactaccagcaaacagctattcttcaaaccgtgtaagcatgaattacaatggttcctcgaaggttctaccaacgtggaaacactgcgtaaaatgacgtggggtgaagatagcgataagcggacgatctgggacgataactacgaaaatcaggctaaagcgctgggttatacgcatggttatctgggaccgatctacgggcatcaatggcgctcatttggtgcggaaggttcttattatggtgttgaccagattaagaaagtcatcgaacaactgaaaaccacaccagacgatcgcgggatcatcgtttctgcctggaacccgatggatctggatgatatggctttgcgtccgtgtcactgtttcttccagttcgtcgtaatcaacggtaaactgtctctacagtggtatcagcgttcagttgatgtcttcttagggttgccgttcaatatcgcctcctacgctctcctgacgcatattatcgcggatatttgcgggtatgaagtgggtgatctggtttggactggcggtgatgtccatatctacaaaaacgcagtagaacaagcgaaagagttgttgaagccggaacgcgcaccgcttccacttccgaccctttatatgccgaaggtaaatagcttacttgatttggatcaagaattctttgactccatccatttgaaagactataatcaccacggctcgctaaaagcagctatggcagtataaacaaagggggcgaaagcccctttcttaacaaggtaagataatgagtgatattaaaacagtagtgaagtcttctggcgtaagtcaaacgttcgaaaaagaaaaactgttcaaagtccttaattgggcgagtattggaagaaatattgatgttaacgcattccttgaaagtgtcgttgacctgcttcgtgatggtatgactaccaaacagatccaggctgtagcgatcaagtatgcagcggatcgaatctccgcaaaagaacctgactggcagtatgtagcggctaacctcgaaatgttcgcccttcgtaaaaccgtttacgggcagtttgacccgattccgttctacgaacacatcactaagctggttgaggctggaaaatacgataaagaaatcctgacaaaatggactccagcggagattgattatctggaatcgaaaatcaatcacgataaagattttgaattctcgtatgctggcgttcagcagttgatcgggaaatatctgttacaggatcgcacgtccggcgacatctacgaaacaccacagtatgcattcatgctgatcgcgatgtgtctgcatcaggacgaaaaacacgctgataaaatcagtcatgttgttgacttctataacgtgatttcggatcgtaaactgtcattacctacgcctattatggcgggtgtgcgtactcctacgcgtcagttctccagttgtgttgtaatcgaatccggtgattctctgggttctctgaacgctgttacgtccgcgatcgtgaagtatatctctcaacgtgcgggtatcggtgtcaacgccggacacattcgcgctatgggttcaaaaatccgtggtggtgaagcagtccatacaggcgttatcccgttctggaaacacattcagacggcggttaaatcctgttcacagggtggtgttcgtggtggtgcagcaaccctgtattatccgatctggcatcttgaagttgaaaacctgctggttctgaaaaataaccgtggcgttgaagaaaaccgtattcgtcaccttgactatggcgtacagcttaacgatttgatgtataagcgtttaatcaataacgattacatcaccctgttcagccctgacgttgcgaatgatcgcctctatgacgcattctatcaagcggatcagagtgagttcgaagaactgtataccagtctggaaaaagacccaacggtacgcaagaaacgtattaaagcggtagatctgttccagttgcttgttcaggaacgcgcacagaccggacgcaaatacattttcaacagtcatcacgtaaaccagcagggtagtttctctgttccggttcgtatgtcgaacctgtgctgtgaaatcgcgatcccaacttcaccgctggacgacgatgataaactggctggcgaaattggactgtgtacgcttatggcgatcgttctcgataatgccgatataagcgaattcccagcccttacacgcatcgcagtacgcgcactggataacttgctggattaccagaactaccctgttgcggcggctctgaaagccaaacagcgtcgttctctgggtgtgggtatcaccaactatgcatcatggctggcaagcaactattgcgactactccgaagcatacgccggaaacgttcatgagttgatggaagcgtttcaatttaacctgctggttgcctctatggaactcgcacaggaacgcggtgcatgtggactgttccacgaaacgaaatatgcacaagggctgttgcctattgactggtactgcaaaagcgttgatgaactggcatcacctgtgtataactgcgattgggaatggttgcgcggtgaaattaaaaaacacggcttgcgtaactcaacactttctgctttaatgccttgtgaaagtagctcgcaggtgagtaactcaaccaacgggattgaacctccgcgcggccctgtgagtgtgaaatcttcgaaagaaggttcattcaatcaggtagtaccaaaccagaataatcagattgacttctatgattatctctggacaatggcaaaacgtggaaacaaaggttatctgtcgcacgtagcggttatgcagaagtttgttgatcaggctatctctgcaaacaccaactatgatccggctaacttcccagatggtaaagtgaaatctgaaatcatccttgaagatctgctgtatgcaaactatttcggcatcaaaacgctgtactaccacaacacccgcgacggtgcaggtgaggaagaagcggaagattgcgaaggttgcaaaatttgattcaatgccccttcgggggctttttataaggtaaatccatgttaactgtaatgaacacaaacccagatcacaaacacttagaacagcctatgttctttggtgaggatacgggcgtagcacgatacgaagaacagaaacaccgtgtattcgaaaccctgactgaaaaacaactgtcattcttctggcgaccggaagaagtggatctgtctatcgaccgtatgcagtacgcgaaaatgccggaacacgaaaaaatcattttcgattcgaacctgcaatatcaaaccctgctggataccattcaggggcgcggcccgaacctggcgttcctccctatcgcttccgatgtctcaatggaaacgtggatcgaaacatgggcgttcagtgaaacaatccatagccgcagttatacgcacattcagcgcaacctacacatcgacccgtcgaaagagttcgataaaattctgcgcaacgaagcgatcatgaaacgttcggcttccatgacaaaatactacgatgatctgatcgcagaatgtcacgaactgaaaaacattgtgctcaaaatcgaaatgttaacgtcccacggatatccagacgaatcgatcgcagagtacgagaagaaacgcaaagagcaaatgcgtaaatgcaaaatcgctctgtatctgtgtatgcacgctgtcaacgctctggaagcgatccgcttctatgtgtcgtttaccttcacgttcaactttgccgaacaaggcaagatggaaggtaacgcaaagatcatgcgtctgattgcccgtgatgaagcacttcatcagaaaggcactcaaagcaagatccgactctggcagatgggtaaagatgacccagaaatggcggaaatcgcttaccagtacgaagaggaagcgacaaagattttcctggaagtatatgaacaggaaaaagaatgggctgaacaccttttctctatcggtgatgtagacggcgtatccctgaaaagtacgatcgcctatatcgaacacctgacagatcagcgtatgcgcgcggttggcttgcagtctccatttaaaccaacgccgaacccgtatccgtggatgaacaaatggttgaagtctgacaacgtacaggtagccccacaggaagtagaagtgagttcttacctggttggcaacctcaacaccgagatcagcgacgaagcctatgcaaaatggcgacaaaaatacgcgtaaggacataacatgattgatgcgattcccgtttatacgggagtccatcacaatctatacgcatacctggcgggttgtgttgattgtgatggatggattagtgaaaaaggaaagaatggttatctggttgggcttacacagcatattcaactatgggatgatatggttagcattcaatctgatttgattaacgatggtgttgatgcaaaattatatgaaagaaccagtagaacaggattaggtaatacgttgatgtgcaacctaattattcaaaaatcatcggatctcttgattctgttaccgagaatcattccataccttcgatttaaaaagcaaaaagcagttgacgcatattttaatttgtgtaaacattcagatcttaatgcaagttcatccgataatgatatgaaaggaagtaaacgaaagtattggaagccggaagaaatatccgaactaattcgtttacattcggagggttacaacaacccagcgatagggattaaaatgaatcgttctaccgattcaataagtcataagttgcatcggttgggtatcatgagaaacgaatgatggaatcgaaagtttatagaatgtctcttgacaaatgcggtcgaatagaccgcagttttatcaagtgtggtgagttaagaaattgcgtttactgtattgaaatcgacggcgtgatcgtgtatgttggtaaagcaaaagacatgtggaagcgattagatacgtacaggaattcaaaatactggagggaagcaaaccccagcaacattttgaaaaccgcacgtctggaaatggcaatcaaaaaacgtaagcgtgtgaatctcattgtgacaacacacgacgaaaacacatatcataattttgaaataaacatgatccgaaaaattaatcctgaatggaataaacagcactatgacaaagctaaccaaaaaccagaaaacactcttcaaccaattaatgaagttgtgtaacgaaaccgaatgcttttactttattgaccaaaaaaccgtaatgcaaacccacgttcgcattttcaactatcgtatggcaagttacagcgattggttgaaacctggtgcgctggaatgtcgcggcattatgtttgcaatggatggggaaacccccgtaaaactcgccagtcgccctatggagaagtttttcaactatgccgaggtaaaggcatgggaagcgctgaaagcctctcctgtgacgattggtgaaaccgtagtggatgtgatgattaaggaagatggttccctgatctccaccttctgtgattccggctatctgggcgttaagtctaaagcatccgttcaatctgaacaggctatggacgctatgagcgtgatccagactaaccgcgcattgttcgaccgcctgaccgaactggttaacgatggtttcaccgtcaacatggaatacgtcgcaccgacaaaccgtattgtaattggctatcaggaaccagcagtggtgatcctgaacatccgtaataacgacacgggcgaatatgttgattatcaggatatcttcgcagatggtgtattacgtccgttcctggttgagcgcgagaaaatcgaaatcaccgatctggatgcattcattaccgaagcctacacgaaagaaggtttcgagggttacgtaatcaaaactgataaaggttttgtgaaagcgaaaaccaactggtatgtaaaccttcaccgcacgaaggatagcatcaacaataacaaagatctgttcttaaatattgttgaaaataccgtcgatgacctgaaacaaatgttcctcgatgatatgtacgcactcaagaaaattgacgcattcgaaacgttattccttgatagtctcaatcgtctgactgcaaaagcattccaggcaatcgaagacacgaaaggaaaatcacgcaaagactacgcgatcgccctgagcgctgacttaacccctgacggtcgtatcatcttcgggcctatgatgcgttatttcgatgataccgataagcaaaagctggttgataacatcgttgcattaatggcgaagaactacgaacagtttataccggaagaatataaatgacaaagtgctttggcgctggaagcacaacgttagaagaagagaaagcagggatcgattccctgcttctttacgttgacgttttcccagaaaccggaaaaattttttggaataacaatgcagcaaaacagaatcagggaaaagaagctggttctattatgagcaaatcaaaaccttacgtgagaattcggcacggcgatagaaaatatttaagacatcgcataattttctattactgtaatggttatctgcctttgcttattgatcataagcatgggttggaagctggggatggtatagaaaatctacaggaatcagatccgcttcataatatgctgaaaagaaaagctaaatcaacacctaaaacggttaaatccaaaggtgttgattacagggcttcgcgtggaaaatatcgagcacagataaagatagacgggaagcaaaaacacatcggttactatgataccgaggaacaagcatcaatagcttacgaggaagcgttatatgaatatcaaaaacgtattgggtacgtttaatataagttcgtggatatggcctgtaatagttgctggttcgttagcagggcttttgtacatgacaatcacgctgaaaagtgaaaacgatcaattggctaaagatatcaaagagttacaggctgatatcaaaaaagtcaaagagacaaacaacaccaatacggtgatctatgtcgaacagaaagcgaaggatcagcagttggtcaaggatgccggacgtaaagatctgctgttcaagaaaccaggactgatcgaaatcaagatcaacaagtccttcgaagagtatatggcggagtacgacaaatgaaaattgcaacgttagcccttgttctgggcgttctgttggtcgggtgtgctgagaagcccccagaaaagattttgcctacgctccccgctaaggtgaatccggtgaatgtgaaatggaaagtggttgcagaagtccgagagattgacggtaaaaaataccttgtcatgccttatgacggaaacccatacgttgccctttcatatcccgattcgttaatcttccgtagctggatgaatgacgttaagcgtcagaaagaccagacagataacattctgtgtaccgtgggataccctgagaaatgcaagtcaaaataatcaagtcatttttccgtgacataaccgaaggaaaggtttatgatgcgaagaaggacaaagaaggtctctggatcgaaaatgactggaaccgtgatatgtggctcaatctaacgaatgagcataacaaagaactgattgaatatgagattgtgaaatgaatctgtttattactgtaggcgtaccaggtagcgggaaaactacatgggcgaaagaaaaagcgcgtcaactggggaacactctgactgtttcccgtgacgatatccgcaaaaccctttattgtgctggcggtgatctcactggctatcgcttcaccgaagagaaagaactgtttgtttgccgtgtgcaagaagatacagttcgtaatgccctggcgagtgggaagaacgttatcgttcacaatacccatttacaccaaaaagatcatgatgtgtggcgagagatcgcgaaagagttcaatgctgatttccatatcgaatggattgatgccgatatcgtagaactcctgaaacgcaaccataaacgcggtgtgaatgctctacctgtttcccgtgtctgggcgatgttcgaacagtaccgtaaactccgtggctgggttccggctatgagctatgcagatccgagcaaaccgaaatgcgttatcttcgacgttgacgggacattaaccaaagttggacaacgtagcccgtatgacttcacgaaggttatcaacgatccgcctaaccctcctgttcaagaactgttcaggatgtataaggccgctggttatgcctgtgttgttgtgtctgggcgtgagggtactgcacagtgcgcacatgataccgctgcaagcctgatcggatacgatgttgacctgagcgatggtatctacatgcgcgaagaaggtgatcatcgtcacgatattcacgtaaaagagcaaatacttgttgaaaagattctcgataagtattatcctgttcttgcagtggacgacagggatacaccagtcgggatgtggcgaatgaacggtatcccatgtttccaggttgattacggcgacttctaaaaaacagttgacagtgagtgcgggtgtgataagatacccgcacaaacaaaggagaatattatggttattcgtgaaaatgaaaatgtgatggttgaactgggtgatcgtgttaaagttgagaatcctgttgaacttcaactgaaactcaaccagttaggccagcgcattgctgataaaattcctgctggttatacagtgaagattgtccgcgatggtcagttctccttccttctgggtattttgagtcaacgtaacatcgttgaacagcagttcgggattcagtggaatccggtaactaaattcgtaacatgggcgggggtattatgagcgacaaaatcagaaagattcatcaggcatggttatgtactgaaccaacgatgcttcgttatggttgtgtgtttgggttggttgataatgatcctcaacaggacattgcaacaagtccggttgttgaatatgcgattccgtcgaacaaatcgtttgttgaagtagtgacacgttcaggtactacgtatcacatcgttaaccctgataacgatttcatcaaagacattctgaaatatatggatgaccgatgaaactacttcacatgatccgtgctattcaacacagccaggcttctcgatgcatatcgacccgtgttggtgcggttatagtaatgaacgggcgtgtggtttcgcagggttcgaataatacggttgattctgattgccgttgtgctgatcataacgagcatatgctgaatgacgaaggtaaactgaaagcggttcaccgtcctgagcattcagcatggtcaaacgataatgagatccacgctgaaatgaaagcgttgctaagtgcgcatactaatggtattatgcttaacaacgcagagttgtacacaaccgcttcgccgtgtccaaactgcgcaaaacatatcgaatggtatgcggcaataggcgctatcaaagcggtgtattacctcgataaatacgatcgtggtaatgatgaatggatttcacgcttacagaaatatggctgtatcgtggaacaaattaaacgggaagagttagaacctcatgttaacttttccagattagtgtttaacaacaatgagtaaagaaatgtctgaactgaaagtaaaagcatccggcgaatatgtgatcatcgaagctactgcgcgtccgcagggttccgaaatcaaatctgaatctggcatcgtggttggtgtacgccagcacggggaacaacctttctatggtaaagttgtttctgtaggcgcagatgttccagaagaagtggcagaacgtatcctgggtaaatatatcccgctgccaagcgctcacatggcgaatgttcctgaccctgatctggttgcgggttacatttccgaaaaagaagcaaaagagaaggaaacgaaatacgtttccgcacattacaaagcaatccaggcaatctacgagatctaaaaatggctaaatcaattcaagcaattatcgctgatactgtcagcaagtccaaaaaactgttcgacaaaggcgaaattctggaagcccccgcgcgtattgacgtaatggcagcaatgatcattgacgcgcatcagggtaaactgaaatcccgtgccgatgaagtcatggcgtacatcgtccagttcgaagacgtatgtaaatacgcgaaagatgttgacccgctggttcgcgaaatttatcgcaagcagttctaaaaattccggccctttagctcaataggttagagcgagcgactcataatcgcgtggttactggttcgagtccagtaggggccaccaaatacgcaggtatagttcaattggtagaatatctggcttccatccagaatgttgagggttcgagtccctttacctgctccaattcgggtgcgtagcgcaatgccgttaaatggttcggaatatgcaacctttctcacggagaaggctctgttggtatccggtaataggttccccggaatgcggggtgaagtaaagaaacttccagcccacaaatttaaaagagaaaaaatatgaaaggtctccaaaagctgtttgagttaaccccaaaaattcgcgaaatcgtcgctgcatcaactgaaaaagaaatcaacggtaaattgatgaaactgtttaccgaagaaatcactgatttcgataaagaatatcgtaaagcgttcgatgcgtattctgttgatggtttctttgcatcaccgcaggtgaatagcaaacatgaatatcatcgacgattctttgactggtcgatcgtcaatatcgttcgtcgaactgatatcgaacctacgaaccatcagttgatctctatggattcttctgtgttctttatccagtatcttattactggtggatttaaagcagaaggtattccgttctgcaacgaagctctggaagaagaattcgcagaagcgtataagtatatcaaagcagttcgttaatcaacaggctatcttcggatagccttttttctggagaagcacatgcgctttttaaaatacgcaagctggtttgtactggttccccttgatattctttctggtgttctggctattctgctggctccttttgtggttccgttctacagtgaagaaaccggacacttacctaaagggttccgttggatggaaacattcgataacccgatcgatggtgatggtggacatatccggcgttgggctaacatccggtatcacttaggcgatctgggtgtgtatgcgcaacgtgtaggctggttgtggcgtaacaaggcgtacaacttcgcttatcacgtcttagggcgtgaagcacaatcagacttcgcctggaagggcaacccgaaaacagaaggtggttccgatccttcgcgtcacggttatctgttgatgtggaatgattcggcatgggggctttatgtcttcaagccgtggcttaaagtcggaaaggttcagttctgcttacgcgtgtattgcgggtggaaactgaaacaggaagtaactgaccctaacgggctggatcgtgcaatgctggcgttccatatcaacccgttacgttattatgtcgtagaaaggtaatacaatgaaagcatatcagattttagaaggtttacacactggtacaatctacctggaagaaggtaatgatgttcgtgtgttggtatccaaaaccctcgaaatggattcagtgatcggtaaagctcgcgttgctccattcgcaaaacgtgaagtcgatattgaatttcaacccactgttaaagtggaaggtggacaacacttaaacgtaaacgtgttgcgccgcgaaactctggaagatgctgtgaagcatccagaaaaatacccgcagttaacgatccgtgtgtccggctatgcagtgcgtttcaattcactgactcctgaacaacagcgcgacgttatcgcccgaacctttacagagagtctataatggcgattgaagacgtacagggctataagccccattcgaaagaaaagatcgacaaagtaaaccgcatcaaggccgcagaagttgccctgggcgaaatcttcaaagaactggatgaagagtattcaagtgattacgcggtatcagataccaattcattcactacagaagaactcgatgcgatgcttgaacgtatccatcaaatccaaaaggcgaaagaccgactgaaagaagcctctatgtgggcgtgtcgtgcggtgttccagcccgaagaaaagtattaaaaatcaagccgttgccgaaaggtagcggcttttttgtttttatgcaaaataatgcttgcgctgaatcgtgagtgtggtaaagtacacacatcgaaacgaaactgaggatgacattatgaaaacttacaacatgaaagaactggtttgcttcaacactcgtcgtgaagcccgtgcgtatgttctggctgctggtaagaatacctctgctgtaatcgacctgggtactgataaagctgttggcgcacgttgggctgctgttgtggttatcgctgctcctgtgactcctgttaaaactctggttctgggtgcgcgtaaagccgaaactctgaaaaccagcacttgcggggcgggtggtgttcataatgttacggtcattcgaaaaagatcttttaatcgagtcggtgtatgaaggtatacggggaaaacagaaagaacaatctccgaagagattgatgtaatcaatgaatttctatgtagaccatacgttaagagagttattatgaatattggtagtggtgattcatacccatcatgcgcattgagcaacttcgccccgcatccgtttacgtttgacggggtagaatgtgcatcaatggagggctttttacaaagtctgaaattcagcaatccagatatgcaagcgcatgtgtgtacgctggttggtaaagccgccaagttcaaaggcaagaaaaagaaatggtatcgcgatcagaccctatactggaagggtatgccgattcaccgtgaatcagaagcgtatcaaatcctgattgaaaacgcgtacaatgctcttttcctgaatgacgggttccgccgtgcgctggctgcaaccggaaaaagtaccttgactcattcaatgggaaagaataagatgaatgaaactgtgctcactgaacgtgagtttgtccgaaatttaacccgattgagagatctgttatgataggttataaagattatgatgaaagagtagaatgcgcgttcctgttcaaaggcgcgattaacccgttggcattactccacgcacagggtgctttgagttctaccctgattattggtgttatctacaaagcgggtgtgtattacgttaccatcggcgcgaacaacattaacgtgatcaacagctacgttgaaaaatgtaagctgaaagatattgtgttcgataaagtcgaaatggatgttcctggcttcgacgctgtttatatgtacaagggttgatgatgggttacgtggtttatttcgattgttcggatcttgatccgttcgttctgcaacaagcaaagaaatatcatcaagatatcactggtatcagtgtcacgaacgatgatatgctgtgtatcgaatttgattattatcgtacatttgagcgtgacaaattccttgcggatattgaagcgtttaagagtacccttttctttgatcgttatgaggttaaatcttgaaaccagttattcttaccgacattgacgggatcgccgtaaaatggcaaagcggcctcccgttctttttgtcaaaacacaacatgccgaccgatatcgcgctggatatggttacggatgaaaagttccgtgatatgaccgaaatctttgggtgtgatcaccaactggctaaaatcctcatggaagaatacaataacagttcgtttattcgctatctaagcgcgtatgacgatgcgttgattgtgatcaaccgtctgaaagtcaaatatgatttcgtggctgtcacggcgctgggaaccactcctacggcaagccttaaccgtattgcaaacctgaacacgctgttcccttctgcattcaaagaagtgatggttgtcgggcatggtgaaaccaaagtacaccgctacctggaagcgaaagccaaatatggcaatcgtctggtttgcttcgttgatgatcttgcggtaaacttaaacgaatgtcataacgtcatcagtcagttgccgttattccatatgttgcgtggtgaacgtgaaaccccgtggtcgcctcaccagtcagttaaatcatggtttgaaatcgaagagaaattaaatgatcttacagattctaaatgaactcgcttcgactctgaaaatctcagagaaggaagcgatcctgaaacgtaatgcaggtaatgatctgctgaaagagattttccgcattacgtacacgaaacagattatgtttcacattaagaagtttccgcaggtggacggtaagccaggcacaaccccgctatcgaatgctatcgcggatttgatgtctgatttggcaacgcgaaaatatacgggcaacgcagcccgtgatcgtctgctggatatcgtatcatcggtgaacgagaatgatcgcgaagtgcttcgccgtatcattaaccgcgatctggaatgtggtgctggtacaacgttaccgaaccgcgtatggaagaaactcattccagaacagcctcaatgcctcgctacgccgtttagtgagaaagccttaaaacgtattcgcttccctgcttactcgcagcttaaagccgatggtgcgcgttgtatgtccgatctgttagagaatcagatccgcaaagcaacccgcgcgggaaatgagtatgaaggtttggtgaatctggacaaggatctgaaaaagattcgtgaatatctgggttatgatgttgtacttgatggagaactgatttatgtccctgctgaaaaaactgctgtcgttccttcaaacagcgttccatttagtcttgctgggtttatgggcgatgacgacgattctgtttctgaccttgtggcagatgttaggcgggaagctaccgagaacgagacacaagcggaagcgaaacgcgaagagggcaacgggattgtaaacaaatccctgaaaggtactatcagcgacgaagaacagcgcaatatcgtttatgttgtctgggatatcgtaccgtatgaagtatactatggcgatgctccgagtgttcaaccatattgcgatcgtttctctatcctggaaggtgcgctggctggctctggtgtaacatcggttaagttgatcccttctatcctggtgcagaactacgcggaagcgaaaaaggattacaacaattaccgcaatgacggtaaagagggttcaatcctgaaaaacgttgatttcaaatggaaggattcacgcgttgcggatcaggtgaagttgaagaacaaaaccccgattgaactgcgaatcatcgacgtgtacgaacacaccaaagaagctcataaggtcggagggttcgtggttgaggacttatcaggagaagccagaacaaacacaggttccggtctgactgatacggactaccgatacgatgaagacggtattaaccgcgtgtacatcccgttagaagaacgtggtgaactggatcgcgaatacatcatggcgaacaaagatgactatatcggcgctatcgtcgaaatggaagttgacggactccagaagtctaaaacgcgtaagaagggcgaacctgagttcagtttcttcttgccaatcatcaagaagatccgacgcgataagaccgaaccggatgatattcacgttatcttcgctgatctgttttaaatagcactttttgctaaaaagccccttgcatgagtaaggggcttttgttatattacaaacatcgaaacgaaacagacaaaaggaacatcccatgcaaatcactaaagaactcgaaggcaaagtaatcgttctggtaaatgaagaccgtttggcacaactgggtaacggtggtgaaaaactgccagcagacgcactcgaaagcctttctaaaatgcgcgtgatgcgtgttactgacggttgggttacttgtctgcctctgaacgacgaagacaaagccgtatacgatgcacaagcggattcatgggatatcgaagtacctctggtaaacatcgaagttgaagagtgctacgaaatcgaaaaataatgcttgcttactgggtaatgtagtggtacattacccatatcgaaacgaaaggagaaacatcatgaaaattatgcacactgcaaatcaacttcaaaacggcaactacgctatccacgatgctatcggtgcgctggttggggtttatcttcatggtatcaaactccttgaagtaagtgggaataccttttatggtgttgaaaacatcgaagcagcgatggaaattatcggtgacctgaaatgagtaagaaactcgaaatattcgaaactatcagcgaagaccctaatcatcgctggtgctgtgcgaaaactggttttgatgctgcatggggtgatactccagaacaggcgcgtaaaaactgggaacaccaacaattgttttttgcctgtcgggttcctaccaattatgaggggagtcaattgttagcatgaaaaataaagaatatgacccaatagaagttaaagagcggttatcggtagcaagaagattccttgaatctatcgaccctgataaacttggaaaatgccctgatacgatttgccttaattgtgggcgatccgtaatggttggaaagtgctgtgataatcagaatatcgttatcatggacaggaaagaagtttcaccggaagtgtgggatcggattcaagagatcatcaaaaacccacctgaaccgacgaaacgtttacgcgaacttatgagcaggaaaccacgttatgaaaaatgaaccaagtaaaactatccgcctgatccgttgggaagggcaagaaatccgttatgaagacgacgaccgcgaattcgtccatgaaatgcttgcgcataatctgggattcaaaaacgccgcactggtgatgatgcaacaaaccagcgatgaagacacctggcaatgcgtcattctcgatctggacaaaaacaaggaatacaccgaagatgaactgtttgcgctcacagagaacgctacagcgcgtcagaagtgcttcatgatcgatatgcctcgcgagaactacgagaatatcaagaaagcccgtaaacagaacaagaacaacgtgttcgacctgttcatgggctatcatgaagaaactacggcctaagcctcacttgttttgctggtgtcgttagtagccgctgccacctgtacacattccaatgtttgcaggtggaaatcttttgatacgtcgcggacacattcaacgatcagatacttccctgaatattcatcccctaacacctcaatcaatgcccccactttaacatccattcgaccctgattgatatcaaaccgaatacgtttttcatagctggataacgtctgacacttcacagcctggaacggttgaccctgtttgtctgggttctggaagttgttctcatataccgcgtttctgttcatggtgatccatgcgttttcaatatcggtactcgcaaggatatcactatacagttttttatccgtcatcgagaaactaaagaaacttgcatcccctaacagggtagtgttatccttatgggtaatgtattcacctttcgtgaataccaaagcgtcacctaaaaacgggttacttacgttgaacttgtaagcctttaacggggtttgtgcgaggatctccgtattgcttttcataaagataccggaaccatcttcccacagataacagaagtcagacgaatctacgctctgcccgttgtcacggatgtaatcaaacacggtttcatacgtcccgctcaggcaagccggaggaatacgcacgtttgatgcgtcgatatgcggcgtgatcaacttcatatcgttatacagtgccgtcatgcactctgtaatcgtctgtacggcgttgttactgaacgaacgggaaaacttacgacgaaacaccgtatgcaccggagaaaggtttaggcgcagtatagagcggttcatatcatcggtttcgacgtttgaatacagaacaccgtagtaatgctgttctaacgtttcgttatactggaaggatacctgaataatcggtttctctgtcaactgatagattaactggttatcatagatctgcatcaatgtttcagaagtaccgttaatgatggttttctcactcattgagacaagggcaggtaacaattcaagatagacgttatcagcgaacttttcatatgttggatataatttaaccgacacgacgcggtttataactttactggacattagacatcctccctttatattctatttactaaatagtaaatatcgggatacttgaggcgatcatgaaagagaagaaaaacacacttgataaatttatggttacgcgtttaaacatcaagaacagcaaaaataaagtagtcacgttgcctactggtgaacaggttacgatcccccgtctgggttatcgtcatttcacccagattaaagcaatgaaagacccaatgcagttgcttgagtatatcatcaaagagattcaaccgcgcgaattaaccgcagcagaaaccgaattccttttgattcacctgcattatcacaatgacgataaagcaatggcgatactgaaagagatcggtattaatctggatgatatgaaaatcagcgaagctaagtatgaacatacttttgataaccttcgattggtcttcaataaaccgaccctaatgctggatgatctggcattactgcttaaagaagcgtatgacaacgggaagccgatcgaactgacggacgaaaaccgtattcaattaattaactgcctgtatcgttatgaatatgacgatgtaaaacgtggcgtactccaggaagtctatattgtgcatgaggggaaaaccattaaagggcttaacatcatcggtgaatgataatggctagcaatccatattttaacgaagaacaacgtcgccggatgcagaatccaccaaaaccacaggcgcaaccgactgttcgtaagatccaggcaacgttagataaagattcgatgcgcgagttaaaggatatcaatgataatacccttgaaaccgcgctgaatacactggacatcaaagacagtgtgaaatcctttgaggatcgtttcaaagagaaattcgctggcttccaggaacaatacgaacaggatcagcaaccacttgctgaacagttgcccgattttgttgggccagcgcgtccaccatcattaacagacaacagcacaaccagtgttgataactccgtcagtgtatcgaaccagcataacccatttgcgaaaatcgaaacatacaccggaacgattgcagaagcaatcaccaagtttatcgaactcgctgaaaagaaaccagcccccgcgccggaacctgaaccagtaccggaagaggaaccggaggtcgatcgggacaagaagaagatccgcgataaggataaagacgagaagaaattcagcaagaaagtattgtctttgctgggtgcaatcaaggataatacatccggtcttctggctcgctttatcggttattctctcgaagcgctggcgaagtttgcaaaatggactctgattatcggtagtatcgtatttgcgatcgacgtactgagtaaggttgttcagaagtggttccaggatattcttgcagagggtgaagcctcgaaagatttgtttggttcatacttcgggaatatcaaaacccttgctgagaaaatcaacgaaggtctgcaaaacttcgatatgagtaatttgggcgaatcgctgaaaaacttgttccttgaaccgtttaaggttctgggcgataccatcaaaaccgcaatcacggaaggtatcggtaatctgatttacgctctgggtgaatataccggatctgaaacgattaccaacgccggacgcggaatgaaagtatcagcactgcgcgacaaacaaaaatacggtcttgaaattgatcccgatgatctgattctgctgaaacaacaggagatccaggatcagaatgataaagtggttgaggcacgttctaaggttgtcgaacaggttaaggctacccagggcgcattctcatatagtttcggacaacaaacagacgcacagaaagcattgtctaagcaattggaacagatgcgcgatcgtgtggctatcgaagaaaagatcaccgaagagaagaagaaagaactgaaagcattgcaggaaaaccccgcactgttaaaagctgaggttgataaagagaataccgctaaccgtaagcgcgtggacgaaaccaaacagatcgaagcagcacaaaaggctgagaagccgaaagcggaaaatgatttcgatcgtggtgatcagattcttgataaagaaaatatcaccaacgaagacaagaaagcaatggagaaaattcttgaatcactcgaagagaaaaacaactccaagaaacttgacgaagacgatagcgaacgattccgctcaatgcttgaccagtggcagaacaagatcgccgcagtaccggaaagcagtgcaagtattgacaagcaaccggaacctgtgaaatcacctgttcagcctacaacgcctaacagcgttcaggtcaacaacaaaacagtaaacaacacggttcagcattcagtacaacgaactgaccgtaaaccattgattgcattagcttaaaggaaatttaaatgaaaattacagtattgcaagacactgtacaatcatttgctgaaatcaaaaatgctggcatcccctctgggggtgctgcaacaactaaaaacgcgttgactcaaccgatcgtaacagcggaatttccttcccaacgtgcagcaggtattgataacgcttataatgcatcaagcctgtataataacggcttgctgttcacagcatatgatttcacgggtggacttgcaccaggcagtaaagacaactaccgctcattacgtcaggcagcacagaacgcgcaacagatccttagtgctaacactgggaacgttcgatacaaacaggttttgaatacccgtactatgggtacacttaaccccatttgtcaaatacttttaccgcgaagcctgaacgataacgaagtgaactcacaccgttatcaggatgcaaccgatagtattgttgctaaaggtttatcccgtgcggtatcaaacgttatctggggcgctgtagaatccgtttctggtggtattctggcagaccgtagggaagcaatcgacatcggtactaaagcagcgtttcaaggctctgataagcgcacaaagatgtattacaatacattcgttatcgaaagccgttatgacctgctggaactgattaaaatctattacctgttcacggtgctgggttatggtactacttcgggcggtactccagcagaattagccggactggttaagcaagcgtataattccagcgcttcgaaggttgcaaacgtttttgcaccatcaacaaaccagacgacagcaagcgatttcaacggcagtatcggggatcagattgttgacttcgtatcgaacgttgaagttattaaatcgcctcctgtgtggtttattcgtgacttccagacaggcgacagtttgcggttccctcattccacgttcgggccagcaggtattaccagcgttcgtttcgggcgtacaatggacaacattgtaaatacgttgagagaatcaccgaacaccccgatcgcagttgaaatcgaaattcagtttatggaactgatcgatatgcgtcaggattcgatttttgatacgcagtattaagggggaacaatgttctatagcgtagatgaatttttgtcaggaatggcaaatagagacttccagcgaagcaacctgtttagtgttgtattcgcaaccagtccagcatcacgcattctcgacagcacgatcgggagtatccgcgatactttaattgatggtactatgagttccattaacgcaaataacccgaacgagttcatgaacgctattacagggggcgtaagcaagttattcagctatacagttgataaagctattatgtccctgaacaaaacaggtttcagtaaaatcatgggggcgttaagccctcgtttaattacttccctgtttggtgatagtgtttacggacagatgctaacagaattccgtgacaaaatgatgtataatatggggttgagcatcgttggtgttcagttgcctggtaaaacactgggttatgaatacgtgtataatggcggtgtaccccagatccgattcacccgaccggagaatggtgaattatcgctaacgttccgtgtggattcagaagcgcgtaacctgaaagtattcaacgaatggttatcagctattcgtgatgatgtctcaggccagttcgcattcattgatgaagtatcaagcgcgatccaggtaaacttacacaatcgcgatggtgtcccgcacagcacgtatgtattccagaagtgtttgcctgttaaagtcagcaacccagaactgagttatgaaagcaataacgaaatctggacattcactgttgactttgcttataaaacaggctggcttgttgaagcagataaagaaggttgggacggattcaaacaatcacttatcgaaggtgcagcaattgccgttcgtggtgtggttacaggacaataaggggcgaaagccccttttgaggttaaaatgattgatataatccgcgtaaaactccctggtggagtgaagcgattccctatgtttaccgtgcgcgatcagttgagtttcttactcacaagcgcggacatggaagggaagacgctcacagaacagcaagaaatgctggatgaaattttagatattctgtatccgggttattcccgcaccgaacaggaaaacattttcactaaggtgtattgtgtatcgttcggtaagaacgcaatcaagatccgaatcaaaggaagcagcggacaatcagaagcattcatgcatgtaactgattacgttttgcaaaatgaatatgcccttgatgattcgcttactctgggattcaaattcccgaaacatcgtaacaacagtgaacaattattccttgaatgtatccagtatgtcaagcaggacggcgaaagatacgaatggaatgcattagacgaggacacaaagaacgcgatcctggatctggtgtctattgaagatatggaaaatatcgttaaactgttacgcaagtcctgtcatgttaccgtgcgtgatattgagttcagcgacttattgacactgtacaaaatcctgttcaacaaatcagaactgaatgagttcttcaaaaccaactatttgttaaataagaataccgtacagattgaacctataatgaatggaagcccgatggaacgttcaatttacgttgcattactggcggaagacttgaaacgaaaagagaatgcaaatgcgtaaacatacaccccgacatatcccaaaatataatgtgacttatcgcccgttaaccattggcgatcttgatgacacggataacttcattattgaaggtgatgtgttcaagcatcagcgcgattatgtttacattatggctctgttcgacagtatcaacaaagagactgtagatctccaaatcaaatgccctgaatgcggggaactgattaagtttgtgctcaatcgtcatcatatcatggtggatgaatacgaagaaaagctgtacggcaatgagatcaagatttcagtcgaaccacaccgcaccggaaaggaagagttacccgaactgattaagtttgtagtcatcgacggtgaacaaatcttatgggatgactgtaaagagtcagagaaagaagccgttctggatagtatcgactatccggtctttaaatcaataaatagcgctctggataagccagcaatcgttgcaaacattccggtaaggtgttcgtgtggctacgagcatatcgttgcactgagaggcttagaggcgtttctaaaggtggttggataaaatgggtgttaaccttcgcttactgtacagcgatatcgatcccaacttaacaaaagactggaacaatgacgtaaccgcctcgaaaggggcggcagcggtaaagaatagtctgatcggtatcgtaacaacacaaaaaggcacacggcctttcgatagcaactttggttgtgagatcggggaacagattttcgagaacatgaacccgctaacagcggaagcagtaaggacttcgattgtctccgcgatccgcgcatacgaaccccgtgtttacaatctggatgttgaagtgattccgcagtatgacgaaaacgcaatcaccgtgacgatttactacagcatcattgatgaaccggaagaagtagaaagaatcaaactccagctatcatcctcataacaaaaagccccgaaaggggcttttcttattccatcacgatccagcccattagctgttgatatcgcaattcgaacggggtgatgaaagagcggttattgataaccttcgtcccgttataggacttaatcacttcctcaccacgaagcacatattcgtatacttcgtccatagtgtcgtaacgcacttcttcgacttcgaagcagaagttggaatattcaatcattccgatcttgttcgcgtaacggcgttcgatgcagccctgtttttcaatctgagtgatcgcagtatcaatgaactgcgcaagtgcttgcatgaaattaccacattcgacttcacgacccccgcttgagatagccaggtaaacgcggctcaatccatcattgccgatgtaaccgatacagtcaccgccaatatagacagaccagactttacccatcggccccatacccatacgattctcactacgagaaacacctttcagtaacagtgccatgataccgccgcgaacgtaattcattttcatgataagccccttattttttcaggttgattaaccaagatggttgggtttctaaactaaccgctttccaagcatatgcaacactataaccggaatacgtctgacatacaacagcattttcatttaaatatttcactttgtgatctgcctcttgttcatccagggcagcacacacgatattcttttcatacactccgccgtttggctggataatggtttcttcaatcagataaacgctgttcatgctaattccttctcgattgcttcgatgatgtggagaacgtaaccgttcagttcttttgctttatcagcggcttcaaccataccgtaacgaggaacttctaaaacgttcgcaccttcgagcaggttgctttcgatgtctacgattacgtagctctcaccgattactgcgccttttctccagtcttttacgaacttcaccattttagctttcatgttctcgttccttttggctgttccgtttcgatatgtgtaatataacaaagccctcacgcgaacgcaagggctttttgagttaatgcataaaagatttgacgtacttcacgatttcttcacgacacatatcgaccggagtatcctctgcaatagcagcatgacagaagatttcaccatccagccagaacgatagcatgtactgaatatcccgaccttcgttttctttctggtgtttcttgatgcgatcaaatgcatcatccatgctttcggtagctgtaagcatttcagattcacccgctacagcagccatttccccagcttcatcactgaattcgctttccagttcttcccagtatactatcgttatcatggattaccccaaacagattttacatttacagagaggacattccgcctctttaacgcgcaagcgctttgttgctgttcgcttcgctgtgttgtgatcatacacatgcaaacagcggtaacagatcaccaatcgtttagccgtcataaccaccaccgcaacgaacatcaccttcaatgaacagttcgcggttatctctcaggagattgtatttcttttcgagttccggcccgaatgcgtccgcgtcgtcataccagtcatagttataacttccggtttcatcgtcgtattccggttcgtcgccgcgctcattgaagtgaacgattttaacatcatccagattcagttctttcagcttgtcccaaatgcgggttatttcgacgctattacatccgaacgcttccagtgtgattgtaccgtcatcgtgtatttgaggcgaaccccagcgaggacgagtatcatcaaacatatccatcagagattcaacgtttgactcaccgtaaatctttgcaacttcctgttctttaccagggcggacaagtccgatcccgataatgaaactactgcttgagctattgctcacgaacccagaacgaatcttcatcgtcttgcctcatatttcgcgttctccgcgattttctcatgatacaggttgtatgacaacaccagcgggatacaagctactataagcccgatgaccgccagttgatattcgcgtttatcgaacgccataaatgcgatcgtggctcccagaataaacacacctaatgcaatgatgaagaataatgtcattttggcagggtatccatttcacgagattttgctttcaggatgtcaatcacagtagtcatcgcctgttctacatcaccatcatagtgaatcaggaatgttttgtgaagtcccatgatcagacgattgatgatataagccatttctgacggtaacagtttaccattctgtcgattgtacttctcaaacaagcggtagagttctgcgctattgcctggcttctcgatgctaaaattatgcatcccggacagaataccatccagatacagaacagttttgttatcactgcgcaggtgtccgccaaccttgtagtagttgctgaatacatacggcttttcgcggatatcttcgatatcgaaatcaccatgatcttcgatgttgccaacatgggcgaagaaatgatgatcttccagttcgagaaggattgcaccctttttgtaagggaatccgactaaatcaatctgccagccattttcaccgacaaatacatcatcaacaaccacgaaatccggcagcataggcgcgtatgcgtggttcttttcgttgttttcacgataggcttgtggttcggacaggtacaggatatcgccttttacaacttcaccccagaatacgttacgtgacatattattttcctcaatatgccccctttcgggggcggtcattgttagattttgacttctttttcttccaggacgatttcacattcgaatgatgtggtttcccagactttccagaaatcggatggaatattatcttctttcggaagaatatcttttgcagcgatagaaactttggtttcttcgaagtccagatccgcgaaccatgcatgggctactacaacaccgtacattacgcgacttaaacgggcattcagtttacggacttcctgaatcgttgcctttgtctgcttatcaagatactcgactacctgatctttgtcaagcgcatccagttcagatttcacctgatcgtaagcccacaggataatcaggtcgccgttgttcagtttcttcttaccttcttcacgcttcgcgacggtagccgctacagcaggaagggaggaaacacccttgattttcacgttcagttctttcgacatgtaaacatcagtcgattctgtgcgctcaaccttcggagagaacccgtaatcacgaataccctgttcagacagccattcacccgcagcctcaccaaagcgctgtttcagcccttctgcgttgcgcagtccgatcgcgttgtcacggaagaacttcataaccttctgacggcctttcaggatttccagacgcacgttatcagtcacgaactctttaccgcttaacccgcgagtcatgccacggttaaccagaggcagagaggtaaagtctaccagaaccgacatacgatcatcaccgattttttccagcggcttgatagtcaggccagaagcacgaaggtttttcagtgtcggaatatcggtttccagcggcagaactttaacgttcacgataccatctttaacgatggtgaagttacgcacctgcttagtttcgactttttccggcagaccgaattctttctgtttgctttctgggatagtcacatacccttccagatccgtgttgatggaaatgttcggacgggaactgttacccaccagatgtttaaccgatactttggttgtggtttgggtaaatttcggtgtccagacttcatgcgctaccatttgcgccgccagtgctttacgttcttctggggttgcagcgtttgcgatctgttcggtcagttgatccagtgtatcatcttctttctgtacagtctgacggcctgtgcggttatacgcccagtgctcagaagacaggtcgatcactgtgtcagtttgtgccagcagttcgagcgcatcaaccagagtgaacgcgttttcgtctggaaccatgttgtaatcaataccatcaacgaaacgctgtgatggatctacaacagcctgtgcaatcaggtctttcgcgttggagtagtcctgtttggtaaagcagttgtcatacgctttgatcagacggacatcacccagcttttgaagcactttccatgccagatcagggttcattgtgtgcagtgcatgataaagcacgacatacagaacttgctgttcgctggcgatgttcggatcgaatccgtcaacatcattaatcgcgttttcacccagcgcccagatgtttttgatgtgttctggaaccagcacaacaccgtttgcagcgttcaggacatacacgcgcccttcgtccaggtagatcgcatgggtagcatcagcaactttgacttcgatacgcgcggaagtctgcgcggtgatgatttcgttaaatgctggttcgtatgcgtcgaaaccttcaacgaatttgtgcaatgcgttggttgcttctgccattttttccagcagaggacggtttacataataaccgtattccaggaacgcgatactgttgaaagtcagtggcagaaccgcacacgctttcagaatatcatcggtacgccagcagttatcataaccgtctgtcaggaagatcaggctgttcaggttgccgttttcagattgcagatcggtagcgatttccgcagccagattcaacggctcaacaaagccagtacaacccgtaggtttcaggtaacggtcgatagccgcgcagatgttagacaggtcagagacattgctaaccttctcaccacggaacaccgtgccgtaatcgcctttgctggagaagtacaggatcgaaacggtgtcatcctgtttaaccagactcgccaggtttgctttcaggtgtttacggatcttaggcagttcgttgtacattgaaccggatacgtcacacacgaaaacgtggtttgtcggggttggcttcgatacagcgtttttgaattcgatatttgtgattgacatttaaattttctcgtatttgaatttttctaaaatttcgttaactttattgcttactgcttcgactgtacgatcacacccgaacttacgcgccaggagttcaacgtattcatccatcgtagtgagtttggattctgcaacgtcaaacgcaagcgcatacattaccggattccatacccgaacgatttggagagtatactcgttcagttcaaatcgttcaagatattttcgcaaagaaaatacatcaaacggtgcggggcgatcctggctaaaggggatcgactcccctaatgcatagcgaggcataacaacacaaacttctgttttcagtttattatccatcagtgatgactctttgatgtgtgttcaaggttacggaagatgtttccatgttccagttgagttccgatcgggccgcattcatcggagtacgtgaattcatagataaacacgccgtcctgattgccgaacttcgtgttgtactcttcatacaaccacattttgatcagagcgtctttctcttctgtgtccagatcgtaccagtctcgcccgtcatacgcaagcgcaatttgaggatttgaacggtaacggttttccgcgctttcttcggtttcccagtcatagcgcttatcgtcgtagaacgattcaaagctattacccagatgaccgcctaagtcacgatgaacgtgattgaccacttcttccgctgtcaacggcggatcgtagtaaccacaatcagggacgcaatcacccatcatttcgcgcaggttgtcgatatcagtcggatctttcgggaaccggacgatgaaactacttgatgaactgttgctcacaaaaccagaacggattttcattttacatcctcaaattgtaagttttctttggttgcgttcgcaatggctttttcgttgttcagtgttactatgcgcagacgttcgccagtaaagccgtcgcattcagtgatactcacccagtcaaaagatttagccatttcaatcgcacgttccagcgatacggtagaaccgaccaaatcactaaatgtatagtaatcttcgcttaaactttcaacagtataaattttcatgatactttaccctttgtttcggatttcaggacgatgttactgtaaggatcttttgctaccagttcccacaggtcgccaggatgttccccgctacggtagacggatgaacggatgatttcgttaaacttgctcagggcttcgtctatgtcgtcatacccgcatttgagaggcttacggttgcaacgaatgaagaacatttcgttggtattctccccgcgttcggcgtttttaaccttcataccgcctccattttaccaatgacttcttcgtatgtcacagggttaggttcatagccgttagcgcctattgtatcgcctactctgtttcctactaaagaagcaaccgcaactttcttgccgtctttccacgcagtgaaatgcagattatccgcaacatacgggaaggtttcgtgattgttcaccgcgtcgatgcagtccataacggtatcagacgcgcagatcagattaccaggttcataatcaaccaaacattcaacagtgtaaatcataataatttcctcacgaaaaagcccctttcggggcttgattaatcagtgtccgaacacaccacgaatagactctgcgaacgcgtacagttcagggtttttcgctttcactgtttcgatttgttccaggatgtaatctggtttgtatttcgcaccgaaccagcagtaagagaaagaacgatcccacatgaacacgttgtagtattcaccgttacgcacttcaaccatcacgtaacctggattagaacccagcgggtaatctttcagtagattgaatttcgcaccagcgccagtacatccgttaaacaggtcattaaaagtcatggtatgttccttttcagtttcgtttcgttaaagctaagataccactatcaactactggatgcaaacacttttttgaagaattttgtttccggtctttctttgtacggacgcattaccaaatctttaccgtccagcacggttggcttaccttcgagttcgatcaggatgaagtttcctttatgatacttcaatacgccctggctggcagaccattcatcattatcccagtggttgtaatgccattcaacaacggtatcgatcgggatttctggttgatttctcataatactttcctaatttgtttcgctatggcttcaatcacgggtattgaaactgaatttcccgcttgacgatatgcctgttttttactatccggtatgataaatgaatctgggaacccttgcaaacgaaaacactcacggggagtaagtcttctggggttctttccttcctgcaacaccagacattgaacgccgtccttgtaatactgctgggtgatagtcccagtgtgcgtagaatcgcttgtgacggcctgataaccgaaacccttaccgtttgccttatttcgttccttacgctctctaaagcccttccatgcgttatctgacagggtgaacgaatcatcagcatcttcgaggatgtcgcctactcgcgtaggggtgcgcgggggaaccggaaacgaaaagaatacgtcatccagaaagcagacaataaacacgcgttcgcgtctttgaggtagtccgaaatcctttgtgttcaggcgttgatagaatacgttgtatccttcggcctccagaagcccgtaaatcgttttaaacgtcttccccttgtcatgggttagcagttcaggtacgttctcaaagaacagcacacggggctttttagcgcgtataatgcggaggatttcaaagaacactgtaccgcgcacatcttcgaatcccagtttcaatccggctttactgaacgcctgacacgggaaccccgccagcaggatatcatgatccggtacttcgttttcatcaatctggaacagatcaccttgtaggttatcattgccccagttttcgatatatgtttgctgtgcgaacttgtcgatttcagacgttataaggcattcgacaccgccgaatgccttatcaaatcctaatcgaaccccgcccacacccgcgcagaggtcaattattttcatacgtcaaaatcaatctcgtcaattttgtatgagttttcatcaatgtccgcccatagggttacattaacgtgtttgctatcttcgtacaactggcgaccatcaatcccgcccgtgtaattgctttcggtacgttcagtaacttccagtcggaggctatcgcgcatgatctgaacaacagcctgttccagtgtaaccgcgtctgggtttttggtatcgcccagtacaacatctttaacgttcaaaataacatcagtcattagtgccactccgttttaataccgtgtcggtatgcgtcaatccccagtggggtaatcagcaaccatgctttcgaattatcgtgataacccgttacccttcgagcgtaacctttttgaatcagggcatcacgccctgatttgctgggtacgtcatcgaaatctaagtctagcactttagttgcgtatccgtaaagtttatacagaacatcaatttcagcgccggacaatttaggatacatcatttgtaataccccacaacatgatcgctgtatacgcgttcgatgaaatcgttccagaattcgcggtcaacttctttcggatatgttgaaatcgctgcaagccgttcgacttcgcccatgacttcttccagcttttcctgtacggttgcgaacggtacgccgccagctttaaccagtttcaggaatgcgctatcaggcagaggataaacgatatcaccatctttgtaaatctggatcaactgcataccaccgcgcaacgcgtgacttaaagccttccagtcgatgccgttgttggcttctgcttgtcgtgcgcgttctccgtattcatcccagagtttgtacactgacttacgcatttcatcggctttgatcgtgaactggaatttacgccccagcacttcatagaagtcctgacaaccagatttcattgtcgtgtcggtaacgaatcggcagaactcgtttgtagggaaacgatccttgatgtcagacactttcacttcacgcgtatagcgtttcatatctggtgtgaattcctgaataccaccgatcgtttcggtttctttcagtacatcgacaacttcgcgcagtgcagccaggcgagaacctttcacaccatattttgcggcttgcttgcgaacataaccgaacaggccagttagttcagtggtgtaaaaacgccagcggttagcgcggatatactgccagatttcagagttagcgatcagcttgtcatccgaagcgtgaagcatatcgagcgctacggtatcaccatcacacgcaaggctgataaacttagtcagactatacaactgacgatcaacgtcgtctacggtgtttttagagcttttatcgcccgtgctggtgtcgatagtctttggggctttccccaggagaatatcgcgcgggtgcgggagaaagatccctttatagtctttatcgcttgtcggtgtgttcagtccgtacaggtgagaaccgaacacggtttccattacagttttcaaaattcaacccccagggtttttgcgataccgcgcagttcagcggtagtgatttcaggaacaacaacagcgtgagaaccgaactcttttcggatcttttcactcagttcagcacgatactggatttctttgtatactgcttcgctgcgatacatataaaatccgccccagcccccactaccagaagtcaatccagtcttacgatcgactttctcgatgttccagcttttcaaatcagcgtctttatcagtggatgcatacagatattgacgcgcaacctttagaacgtgaaattcgcgagggtttgctgttttacgggtattgtataacctttcgccaggatcgtaaagggtatcacccactttcacatcagttaaatctttcggattcatttcattttccaacgttttgacttttcacagtagaacaccggaagacgggccagaactggcttcactacgtcttcccctgtgttcgtgttatgaaccacttcgattgtaagggattgcccttcggacggccttacaatgtccagttccaagatctcacgattaccctttgtattgatttccgctacgtagtaatcgtgtccattgatgtttacgacatcacccataataacgctaattgtttgaatcatgagtatgcaaacttaattttaacattcagggaatccagcaggattgaatcacgcccatcaatgacggttaatcccttgtatttgctatcgtcttcgctcttacgggagtatacgcgacaaaccagagaaccatcctgtgctatgtattcaacatggtattcacggcgttctgacgtaaacacatcaccaacaacaaccggacgatcgacattctggcgtttagtcccttcgtaggacagtttgccgttgccgtctacggcgcattcaatgcccttatgtgtgacgctcgcaacagtaacaggctctacagttccaccgatcagcattgccggatctttggttcccagtttcatcaccagtgtttgacggatattatttgacatcggttctgtaacaaacacataaaccatatcgtttttatcacgcgcaacagattgcaaagtgaaattcttcgtacctacagaaccagtatgattgattcctacacgattaccgggttccagcgacatacgacattttacatcagagataccgctaagggttgctactttcatgatttaattccttcaaagtcttcattagatttccaatacacgttgaagttacggcaatcgtggtcggaagtcaacgtatatttttcttttgttttctcgtcggtgatcaccatcgtttcattctcgatcgagtccacaccatagacgaatactttatcaccgcgtttattcaggaacgcttcacctgtttcaaccaactgccagcagttgacgggtaaaccacccgcacagatcggacggtttacgaggcagtaaggacgtttaatcatttaaattcttccattgcataggaagtaagatctttgaaataccttgcggtgttgccttctgggttgtttgtaatctccatcaggataacagcaccatcaactcctgctttcttagccatgaatgaaatggcttcggtagcaataatcgttgctttcataacatcagctttagaaacgttgatcgtattcatttttcttccttttcattattcatgcggtatgtgtatataatacaaaagccctcacgcgaacgcaagggcttttttaatcttttatcagagtcccgtgaaagctacaacgatttgatagtggtcatcgaagaattccccttgtcgttgtacgacctcatgtaagggcatccagaacgcctctaacgcatcgtcagaaccgcccataatgcggggcagacttccatcattgttaggctctaacttgatgtactgcgccacagtcggttttgagaagtgtacggaacgcttcggatgatcgaacagcatcgaattacggattgaaccacggataaccttttcaggaaccttgatccgtacctcttcgagcagttcgcggatcgcacaatccaggaacgtttcatttgcgtttttgtgtccgccgggaagggctaacgcgtctttacctggggcgaacttacgacgaattaccagcaggtgattgttgcacacaaccacactatcacccgtgcaacagtttagcgcgtcggggtatgggtagtttttgaatttctccaattcgctttcccatttctcgtattcgtagaataaacgccagaacgtgtcttccatcatccatttgtcgatataatcaacggttgcttgaggaacaaagcgcaacagtttcttatcccacccgtttttatggttaaagataatcggacgcagatcggttgctgatagatccttgccgttaatctggacaggtggaactggtacgtgtgtccatccgaacgctttaagccagtatgaacctgcatctttttcgtaaccgtagatagcgattttgtcgcctttggtttccctgatagcagtacgaacagaggttttccatttctcttcgttgtaaagataatctggaatgtgctcaaactgaacacgaacaacatcttcgatcgggaagttagcgtttaaccatgagaagatcatggtttgacgctcacgcgccgtcagcgggtttaaaacgttagggtaagcatatgctgaacccagaaggatgtaaacgatctttgcttctccgagtgctttacgcaccattgctgcatgaccattatggaagggttggaatctgccaattacgacagctttatcaaattgtttcataacgtgctccacgtttaaaggttaatcataaaacagacgcaatcaccaatacaccaagaaaaccgccaataaagccgaagaatagcgaaatgaagatagtaaggatgatctgttttatgttcattatagtattctcgttttaggagtcaagcccccaagagcgggggctttaaaaccttatttacgagaatcgaaaatcactttaccagcgtaatcagaacccatgacagtttgaggtacaccgccctgatatttgtccgcgatggtctgctgaacatcaagttctttccagcggatcatttctggggtgattgtgcgttgcagaatggcgttcgcttcggcttctttcttagccgcatacagacgggcatcagcatcacgctcgttagcctgtgcagcattgctacgggcttctttgtcggcaattgcctgaacaactgcctgttgagcgatttgctctttacgtgccagttctgctttttctgcgttcacctgttcttcacgaattttcgtgttttcaacctgcttcttgatcgcttccggcaggtcgatatcctgcaagaatacctgtttcacggtgtaaccgtaaggacgggcatactcttcaacttcctgctggatcgcgatctgtagctggctttgaacttctgcattatacagatcctgtgctttcggtacagatttaccgaactcacggacagttgacagaagtttttcagtcacatatttatccagcgcctgatcctgactacccgcattgatacggttgatcggggctttgctaccatcgaactgtaacatcacggtcatatccacagtggatttgaatttatcctgggacggaacctgcaatttgtcaaacttcattgcgatgtctttggtgttgaacacctcgaaatcagccagtggatttaccaggtggaaaccaggcagaacaggcttcggtgaaactttacccatgaaggtttgagtttttaccgtaccatcctgaacgatagtgtacgagttcggaaccagccacagagcggcgattacgcccagagcgatcagtgtggttttcttcgggttgtttacgatagtgtttaagttcatcattatttccattgggtttatgtttcaattcgatagttattctatcatcactttttcgcttgtcaaactctttttaagaaagttttgtcagcttgtaaatcgtttgatagcacaagcctttgatctcgtccaggacgttcttcaatgaactatctactgaatcatagatttcgttggcttcatcggctattttacggagatacgcgaccgtgtcaagcacattttctgtttttaatacgggtttgtatcgaccagtaatgcctatatggatttcggtgaatttatcaaccaaatcctgcatatcttcgtaaaacccttcaaatgctttatgctgtgaatatgaaccagtcgcaaaatgtgcgctgtgcatataggttacagacattaagcaagtgccaataaaggcatcaattttactcgcggtatcgcgttctgttacttcgttaaacgtctgcatcttcatcccttatgaacgatgaatagcggcgaattcacttgcaacccgtagccctaaacgtttacattcgggttcggatttacattgcttctgctgccattttcgttccatgtaattatagaatagttcgctggtatttacgctgggagggatggtgtcaagatatacctgtagcgccgcgttgatgtagtaatcgaactctttggcgactacggatctatcatcagcatgtgatgacggagacaagattaacaaaccaaacatcagcgctttagatatgcgtttaatgttcataagcaattctctacgtgcttacggatcaacaatagatccgttcctgtatatatttatagcaaaaaaggggcgaatcgccccttatgtaaaattagtctaaaaatacatcaagttatctcataccagcataagctacgctcaaaagcgcggatcttatttgcgttctcgatattttcatcccatccaattacgccagctttcatccggcgtaattcctgacgcattttagcgcgtactttcgaatcaatctttttcacagcgattgaaagcatcgcggagatatcacgatgagctttgttaccgtcgcgattcaggtttttatcgaaccggatatatgcgcaacctgatttgtgtttccagttggttgtataccaacgtaaaccatcaggactttccccgtgctgtgcataatactctgaaaatgcttttgtctcttcgatctgttcgatggaggacttatcacggactggaacatatttcttacggtaagtacggctcatagtgttctcctttgtttgtctgaatacaccttaacagttcagaccaacattatcaagaagtttttcgtgataatgtttgcgacagagcgaaacgtatttgtcttcggctccgatctcaacctgcgccccttcggttacgaagttgccttgtgcgtcgatacgtgcaaccgtagttgctttgcgtccacagtgacacattccgcgcagttctcggatctcgtctgcccaggccagcaaccagtaagaaccctcgaacagattcaactggaaatcagtacgcagaccgtaagccattacagggatttcgagttcatcaacaacgcgacacagatcgaaaacgtttttcttcgaaaggaattgcgcctcgtcaacgaagatgcaagcaattttattccggcgctgaatgtcccagaacagatccatatcaggcgcaatcaattcacacttttcgttcagcccgatacgcgaactcactgtgtttgatgtgcgggtgtcgattgctggcttatagattacaacacgcataccgcgttctttgtaattgtgcgcgtccgtcaatagtcgcgcactctttccagcgttcatggatgcatagtgataatacagtttagccattgacacgctccacaaacttaatatgattctggaatttaccctcaccttcatggtttttgcatgttttgtttgaacagtatatccaccaatcccactcgtcgtaagggggtttgtcaatgttcatgacgcaaatcaaagggaaatgacaatcccgacaacgaactttttctataatgtgtgcgttagccaattgtaaaccacccgttacccatgagttttttgttacgtcgcgcaagatgctctttgatttccggcatctggatagcaatatcatactcttctttcgtcatggtatgatttgcacaacccatacacccgcacacctgcgcgttacaccaacggagtgttccgtatgtcgcaatcaccttcattgctttagctttgattttgtcagtcatgattataaccgcccatttcgctatcttgtgctttatggatatcaagataccacatgttgattttgcttttcagttcgcccatttctttatccagtccttcatcaacaagacaaagaatgtcaaccaccgttttacgctgtgtgatgttgattttgttcgctttcatggactgcgccagcgcttcacaggttttcaccagtgcggcgcgttgtcctttgattgcggcgatccgtttgttcgctttcttgatcgcccgacctgctttgataggatcaatcatgataaatccgccttacgtggatcaaccgatggatcgaagtgaacgacgatgatcgggtaatctcccgtacactcgtcaataatggcgctaatacgcagccaatcacccccagcaagccccgcaccgataagaggggtaatgataggcaatttctcaggaaacgccctggcgcgttctactgcgctcacaaagcatgaccggattgcatcataatccacttgtgggccagtaccccagaatttaaactgagtgtatgcattgaagacaatctgaccttcttccgtcatgtagatggagttagtgcctaacttccgctgatcgcctttcatagtcagtgcatcaattttgaacgcaccagggattttgtgcttcacttctttagcaatacccgcgcccatgttgcaataacagttacacccatgaatcaagtgtacttttcgtttcaggaacaactctacagcgttccctttgatttctttaataatcattttcatcacctgtatagtggcggtaagccagcacagccagccccgcgatcacaaccacaacacacattaagatataacctgtgttcatttaaattcatcgtcccatctttgccacgcttccaactcgtcatcatatacagggaacgagctttcgtttggctttttaacgtaataccagataatgattgcagcagcaatcacacacccataaaagatcactaatcccaacatcagtataatcctataccagcgttatattcttcaaccaggtaagtacggagtttttcacaacgttcattatttggcgctttggtgcagaggttcatcatcggttcagactgcaaaaactcacgctgtttaaccagcttctgacgcttgaagaggtgcgcattttcttcgccccatacataagccgcgtccagttgttcagcgattacctgttcacataccgcaacgtctttaatgtcgcgatggttgcagagttcagccagtcgaacatcagcatgagcaaagccagcaaacagagtgagtaacagcgcaagttttttcatcgttttaccttagtatgaatcgttttcgataggggtataataatgggtttcgcagacatacgcaagcactgatcgcaaactatcgctttcaaattctggattttgattgagtttcagactccaacccgtgaagcacatccagcgttcttctgcaacgtcaaaggctaaccaatacgtgttgaactgtgaacatgtatgttcgaagatatcgaatagtagtttaccgccgatcggtttcacatatggtttcacgcgttgaagcgatttcaggactgtttcgaggttactgcgatcctcattcatcgcgatacggagaatatgctgattggtttcttggttatatccatcaatccccagacccatatcctggaagaacttagtcgcatcatggaaaatctctcgtccgctgttcggggaattgatgtagaactcaatgcgttgttttggagtcatcgcgcggacacgggaagcggttttgtgatcgatctcgtctttgacctcctgacgggctttcagcaacccgttcagcttttcctgatagggttttacaatcgctcggatttcgtcgatacgttcatcaataattgctaactgctgttccggtgtcagtttagtttccatgttaagcccctacgcgcacaaagcgatcttcaattgcatcattaacacattcgtaaatgctaacgtcattcgggacgtgcttacgaatacccactttcacgatatccatgatctctttgttgctaccccacacgttcaggttgaagtaaacgccaccgctatgaattgtgttgttgccaacatcaagatacgtatcttgactttcgcagataaacagtttgcgtttttcttctccatatgcgaagtagatactgaacgattccatacgatgacgatcgaccgtgatggtttccactttaacctttggatctttgttcagttcatctaacacaccctgaatgatgtgcagcatgttcggcttgatgatagtagggtgactggtaataactcgatgtgatgtgctcataatttaatcctcaatagttggtacacacataataaaaaagcccctgcgaaattgcaagggctttttatcagataatgcgtttttcttctaacagcttcgcggtatggttaaccatgcgagcgtaatcacgggcttctttctttgaatacttgaatcccgcgttgtaactcgccagcgcctttttcaagtcgcctttgtggtaatcaagccagtattccagttcgtgaagtgcatacttggaaccaccccgaagggtttcgagcttattgattactacgcgtttggaatatgatttatccattcgtgcggacgcgctacgggctgttacttgaaaacaaccataagcatgatgattctttttgcctttccctacgttctcacatgcgcgagactcgatccaggcaatagccgctaaatgatatcccaaacgtttcgatgtttccgattcaactggctttgcagttttgcgatcgtactcatttccgatcctgaaagcgtactccaaaacctttttctgctttggtgtaatatcatccaattccttaacatagctgggggcattggctggcgctttcttcattactgttgcttgttgtagcggtaaagttgacttcacagcggggagtgtttggataaactctcctaacggatcagtcgccgcgttgccagaaaaagagcataagaaaatgctggcagcaaagataattttcttcattgtaatacctatttgtaacaagagagggctatgataccctcgtcttattatttatgcaacgattttacgctgttttgcttcggtcagttttttctcgatgaattcagcaatgttatagtttgaaatcgaaacgttcggatcgtacagttctacgatttcatcaaacgatacctgaaccacatgtttaaagtgaacactccagccagtcgtaaagatttcgctgttgtcgaacccgcaatcagggctgaacatggcgcggtatttgtatccgctgtaatctttcaaacgattcgggctgtgtgcgtcactggtgatcaggaatttcccctggtgagtctcaaccacgaagaaataacccagacgttctttgttgtccagcatcgtttcgaacttgcggttgttatcttcacggtcaacgcgagtttggatcttcttccagacctgttcatattcaggccaatcatgctcgacaacaaccccttttatgggttctttgccttgctctttacgatagcgatcaattttattcactaccgcagagagaagcagtttgtcgctatcacttaacgccgcatcaatatctgcatatttaagcactgcataacgttcttcgcgtttcatactactacatccttatcacagactggacaccggatcacacgatacacatcacgaccgccagtgtaatcagtagataccttttctttgacatcctgcgcagtgtatgacagaacagcaccacaacgacaggtagtttgttttggggtaatgcttacaacttgaaccataataacctcacaagaatagtttcacttcgctaccgcatttcgggcagacgatatgttttttcacgatgtaatcagcagcacggaagaaaccgttgtagaacacttcgtttttcttctgtacatcagacagttcatactctaacccacttttgcagttagtgcaaacggtaattagctttggactaacaataacgctgatcatgtatacctcacgaaaaaggggccgaagcccccttgattaaaagttctcttcgacgaatgcagccagtcgcccacgatatacggtatccaggatcacatgacttgaatgaccgtactctttaagtttttcaaccgcatacacaaagccgttgttaacagcagtgtttcgcgggttgtcaatctgtttaatattcccgcatagtatcagaagggtgttctcaccgcaacgggaaatgatggatttgatttcgtgattgctcaagttttgacattcatcaacaatcagaaccgaacctttacccggatcaggatgcccgattgagcgcccacggaagtaatacaggctagggaactggacaacgtttttctccagcagcccttctacatatttgtcaacttccggttgatccttaaacagaatgttcaggctcgtaatacatggttctacagcaggacgcagtttttcgcccagagtaccaggtaagaacccgatttcgcccgacagaggactatccgatttaacatacatcaggtttgcaaagtgtccggcgttaaccaggtgcattgcaccagcaacagccagcattgttttacctgaaccagcagcgcccatgatggtcaccacatcggtatttttatccataattgcatcaatgaatgacgcttgcagtgcatcgcgaggctgaattgttttcatcagcttacgcttcatcgcggattcgtgtttgattggtaagagttcaagctgatactctccagcagccactacacgccctacgagttcaccatccgacagaatgtattggttcgggtaataatcgccgtcaggaagcgaggaatagcttatttgggctacttcgccaacatatcctaacacctcgacatcatcccagaatccagggatatcgacatagccagaatacaacacatcgctatctttcagcgagtcatcgcccgtgtattgttcaacaggacagcccttagacatcgcgatcaacagcatgttaatatcgcgggtgatcagggttgcgttttcctgcatacaggtagcgataattcgcgcatcttgtttatcaagcgggaactcttctaaaccgatataatcaacgatacggagtttcacgctttccggcagtgctgggttcgtcaggttcaacgaaacccctgtttgggtaattgcttcgtacttctgccccaggattactttagacaggaggcggatcgccaatcgtgcttcatgagcggttcgctctttacttttcaggtgatccagttcttccattgtcgcagaggtgataatgatttcagtacccgcctcaacgaatgagaagattgaatatgggttcgagattaaaacgttggtatctagaacatatttcatagaagttttcctgttaattgcggggtacgcggattcgcaccccgcgcactgcaattacatacccaaacggataatatggatatatgggaacggatgaagatgacttgaacgcatacacaaggtcagcgtttttgccagttcaaaccgttcgtcgatcgtcgtgtcacattcatcgaaaatcaggttgattgcctgatacttgatcgtttgtccacggaaaatggaagtcagatcttgacgtttcgacagaatgaaagacgaatcagcgcccttatccagtccatgttctaccgcagcacaaatacccatctgctttgtcggtgcaacgtagatattcagtgtccctttagactgcttgatgatatcgaaagccgctttggttttacccgacatccgacccatatccagcgcagtttcgaagatagacacaccgccgcattcttgcccccaacgcccatcaacgattcgcgcaaggtgcaggttacgtgactgctttacagcgtcaacatagaattgtgaaatcatattgtcgccttatgcaagttcaacgtgtggtgcgtcgataaatttcgtttcaatcggaaggttcggatcgttcttccagttgatgccgtagcgcagttttacacccagttcatcagcggcttgtttcactgcattcaggacaggcaaccacactttcgggttagtctgccagccagcagggagaacgctaggatacagatccacagcatcaccagtgatgtgttttgagttcatggtctgggaaacacccttgcggacgttctcgcgctgttgctctacggtgcgcagaccttcgcgtacaccaaaatcaacaggcgagagttccaaagcacgttttaccaccttaaccagttccggcttcacgccttgcaggttgttcaggcttttctgactaaatttaaacatacatacctctttatgaaaataccctatgggctacacagggtatttacggtttaagaggcgcaacgttttacatgtaaccccaaattgcatcttccgcgcgatcgcgtttccagcgaatcgtcatttccagcgaatcgtcatttcaacactctcctgtttgtcatcaggaggaagtttatcattattgatttgttcaatatatgcttgcgcatctgcttcgctacggaacaacgcatggaaattataatggttgcgcccagttacgttacgatcatccagagagaattgacctttattttcccaatcatcatacacagtgattccgttaacaaacagccccagcccacgatgttcacgcgggaagccagtgatgatatgttttcgacccatctgtgccttttcaccagtgatactgattacttcgtacaggattgcgccaggtttgatatctttcaggacagcacgtttttcaaaagcgttcataatgtattcctcacaattagttttcatatacagattaccacaatctgttttgatgtcaacaaggtctatcgtttttatttgggaaagttaacgtgaaaaggcgatcgtgtaatgcttcgatccgttcatacgcttgtttcaggatcgtcttatcttctgggttcgttgtctcgatgcagatcagttcgtccgagtcgatagcgatcacatcatccatcagtgaagcgaatacgttcacgtcagggtgagtcaattcctttatctccgcttccatcccgtcatgctgggataacagttcgatgatatcgcgctgtaaatctccctggtacgggaatccggtttgaagatggttgataattctttctgctttggtcatatttcacctacaaaaaagcccctttcggggctgggattaaatgtctttgcactggcaaacaccgtatttggtgaaaggcttgtcaccgctcaggtaagaccagatatcgcaagcctgttcagcggtttcgaagattgcagcatcatagaagccgtgttcttcgttaccatctttattgaggaacacaggaagccagctttgcggtttgaagcagtcagtaacaactacccaaccttctttcgctttcattgcttctttgttcgcttcaaccatttccagcatttcgttcagtaagttcattttaatccccttgtttatctgtttcgttgtctacgagagagatattatcacaacggggattagtgtcaacagttattcgaaacgaattgtgctatttttgaaaaacattccagagcacacagatcctttgatctgcttgccgttcacaccagttgcttcgaatccggttgagtatgtgtctttttcagaacatgcaaaccacttgtaacccgtgaactggatgttcgtataaccctgtgcttccaggatacgctgtgcctctttctcgtcagtacagcttgactgcaagaacacaacaacgacaaccatcaaaatacacacaacaattttccacataatttatactcttttaaggttagttttgctggcttcgatccagcttacttggttagatccaatatcacccagacatacagttgtatgactaaatgtgttcggtaaagaaacaccatcaggagataacaacaaatcatgtacacttacgctggttgcatacaaataaccaccggacgtatacagtgtttttatgaaatcatatgaatcgttgggccacttgaaacggtatttctggttccagagttcaacttcatgcacatcatattcatcgaacaggggatcgttgccctttgtcgcttcgtaaagcgcaccgcgccattcaactaaatccgcttcgatatcacttacacaaaactcttcttttgcgctaagtttatcaagcatcatttcaatagtgcggatagccatgcttaattcacgatcgagtttcatacaataccctcttcttcgagcacttcccagatcaggcgatccaggtgcatcaggttccacataacggagtcatacgaacccagcgagcgggagtaaatcactccccatgaacgataagccttttggaatgattcagcactgttttcatcgtgcggcatatcgtcacccgaagcgatcagcagtttcagaaccatcaggctattgagcgcctttggcgtgaattcttgttcgcttaacttcatcgcgtaccgttcgatgatcgcgattgacttcggatctttaatacgcccatctgtacggcgcgttttaaacgcgctcattaattcatcaactacggcggtacacttcatatgcttcatccttttcctgtgcagacatccgattatagcggatctcttcgcgctgttcaacttctctcacggcttcggctttcttctcagcagtgagtatgtgatgaactacagcgtttcggattccccagagatattcaatcatctgcatatcttcaacggtgtgatagcctttcgcatcacattcaaatacaatttcatcgcgttctgccattgccacctgtgcggtagaaggacaaataaccattccagagtatttttcaatcaacgattccagtgtacgcggttttgctggaatgtcaatagataccggaaccattcgcatcgttgaatcattatgggattgataaatcatcagaatgtaatctccgcaaactgcattctacgctcaatcgcatggatagcgttatcgcgctgttctttgttttcatatccagcccaggtaatcggggttgaacagatcaggtgaaaagtgattgctgggtgtctcttcccttcaacaacgattgttgcatcatcttcgatccaggttacgtgatccagattcaccggatagtttcttacggtaacagtttcaccaaccaaaagcgacacgtccagaatatcacgatcgcggacatatgatttaatacgagatacgattaacattatttcaactccactgcatatacatcggtttcaggggctttgtgtacgcgcatatctttaccacataccgcataagccggacagttacgacaaccgttatgatccttgttgccagtcagttctttacggaactgttttgttttcgggtgttcccagatatccttcacaaaatcttcggcttccagaacatccagaccttcttcccagccaccttcaacccagcgttcggtaaacgagcaagggaagaactgaccacgttcgttgatgtaagagctaaacatcgtcgcttcacagtcttcggcgtattgcttgtactgttcgaagttcgggtgtccctccatcgcttcaacgaaagcgggggctgaacagctatcgaatccaaatcctacaccagaatcgaggcaatattcaacaagttttttatattgttcgcgggtaacggtgtcccagttcttaccgcgtcctttttgtttcagtcccaggaacacgatcgcgtttacttgtttcaggcgcggatcattcttcacggcatcaaccacgttaaacgcgtcatcataggttttcgagctaaccatgaagtgaaggttgatttgctgttgtccggcttctgtcaggttcgctactgagtcgaaagcgacatcaaaaccagcgtgtttataaaccgataccgcaacagccccagcaaccgccgctaaacgcgctgcaacgtcttttgatacgtcagcaatggtaaggttcggcacaatgcctttagaacgcgcatacgccatcatatcgaacatatcagggtttgtttgtccctgtgcatcagcaccgagggcgcattgagtaagccagggcattttgtcgatgatttttttgaagttggcaagatccatgttgaacccgttcgggttattggacttgtagcagaacccgcagagtttacccgctggcccgttgcatttggtagtgatctcgatatcgagaatttcggggaatggtgcgtattctggatcgtgggaatatgttgcaccccagcgagcgaattcaccagtatcaacgttgaaattatagttgtagaacttcgagcgagcgaagcgcatattgccgtgttgatagatgaacagggacggcgctttgatgctggtaacgatatcgacagatttcataatataattctcaaaatttaacgtgggattggaagacagcgcgagcaaggctttcattgtcgaacggtatcgactggtgtttctctttgctgtcaatattaacgcgccagaactcactcgaaccgtttttggtggagtaatgcatcagcgttaccgttttattcttttccaggaaagtacgtttgtcaatctctgttttgatttcgtgctgcatcattttacactccgtttcagtttacgttcgtcagccagttcttttttgtacagtttaatgtacttcccgttaaggatgcgaagctgttggaaaactttgttacacaaagcacgttttgctttgtattccggcgtattgcggattgattcgatcgtcatacccatttcgtttttagggtaagcgcttaactccgcgccgatctctctgtaccagttgcttaactgatcacgctgtgctttgtactcttcaaaagttaacattataactgatctccgtaatctttcgctgcatcttcgggggttgcatccagtcggtaaagctcaacggctaacggactgggtttgatttcgcggttcaggatctcactgataccgcgaaggaattcgatataaggacggaatctcatttgatacgtaccgcgttaaaagcctggttgcgcagttcataagcctgttcaagctgttcagtagtgaacagagggctatcggtattagtggtgaaactgcaaatggttttgttgtcggcgttgacttcttcaacaacgatttcataaccccatgccccgctgtactcacatttcacgttccggtacttgatgtaaaccgctgcaatatcttcttttttgtagttccggcttttgtagatgatttccatgatatcctccttcgtttcgatgtgtgtacaataacagatcagggttatggagttttagcaattcgtgctaattacagtagcatttccatttgcaacagaacgctccagggattcggcggtaacagaaccattgaccgatattgcttgaccaccaccagacattcacgccgtcagttttgaattcgatgttcaggtagttactgaaaatatgtttcatgttattccccttatgccattttcttagcgattttccatgcggctttgaacgctggaacatcttcaacatcaacccagaaaccagaaccgaaaccatcgttgtagcaagggcaaccgtcgcagtagttttcccaggtcatcactttaccaccaacagaagcaccagtttccatcgcacgtaatgcatcttcaactttttccagtttttctgcattgtcgtcataaatgatgaagtaccatttgccgttgtattcgttacccagtttgattgcttcgcgaacaagtttcatgatgatttcctttttgtctgtttcgtttcgatgtgtgtaatataacaaaagcccctggcggttgcaaggggctttttaaacaaaaagtgctattttgtttcttcgaggattcgaaggatttcggcgcgggtgatcggatgttttgccagctcacggatcgcgtggtcaacgtgtatcttacacatcaaaaacttctccccgcacttgtcgcatgttgcatacatatcgccatgtatacgcccgatcccatcggttacggaatgatgcatccaggcgtaaggagttccccgcatccatccggtagcaacatgtttacattctcgttttcgtccgaacatattaccacccgttaggattgcggaaatgtgtttgccagtagcgcagttgttcgcggttcatgttttggttatcaatcaccataccctgaatcatctgcaacatcatgcgggtttgattgacatcctccaggctcgctatacgctgttttaaggctttgttttcctcttctaactcaaccatacggttgtatgcgttgacgcgctccagaggcatatcagggcgctctttgaggacacgggcgcgggatacttcgcattcgtgatttgctttccagtgcgcagcttctgattctgctttttgcttgtctcgaagcgcgagtgacagatcgctaaccagatccagaaccgtttgcggatctacggtttccagatattttccgagaccctcttcccagcttttaatctgtgtagggctgtcgccatatggaacaccatatgagaacgcgcgtttatactctttgcccctgaaaccatattcctgatttccctggatgctcatattttcaacgagagtccacttactacccatcatagaagaaatcgaacgggctgatttttcaatttcttcaagtttttcacttgttactttcattttgtactccacaaatcatattgtgcgcgaaggatagcgtaaaggctaccgatattgattgaatcgaccggacactggaacatatcagagcgcatcatattgaactcaatattgttctgttcaacgaagttaccgatcattgatgtccagcccatcaccaggttatatccgtcttcggataacccgtaagccaggttaaccctgatacaacgcttatcagccagttctacgctgatacagttacttgaatgcatggaattgcatggaaatttgttaggaaacttacggaacatctgggtaaggagtttagccgtttcaatgttgatcgcgcgttcctgatccctttgcgcctggttgtcatgacggcgattcagatacttttccatttttgggttgagattcacatgttgcataatatattcctcacaggtttaaagcgttcttttccggttccattacatgaactgcatttcggagatcggtcgctatcatatcgccccgatccgttacatgcaacacatttccgtaatttccagccatacacgaaccgcatgtaataatcggttcgtgcggccttgcgttcgtggaagttcatactttgttgtaaacctgaaccagccacatttcgatgttcggcgcgtaagtaacgtttaccatcggcatagtgcggtatttgtaagcggctttgtacgcatcgagttcagtcggaacacagaaagagaaaccgttgtcataacgttctgcattagaaacttcacaaccaactacagcggcaatgtttttgttcatgttcatgatgttttcctttctctgtttcgtttcgatgtgtgtaatataacaaagcccttgcattgctgcaagggcttttttcactttaatcgaatttttctggcaactgatctacaattacctgagtttgatggatttcttcactcaatttatcgcggtaatgaaccagttcacgggttctggatgctgaatagctaatgattttatcagcggtagcggtgtaaccgtaaccagcacatgcgatttccagttttgcgttatcgccattcggtacgcggatatgagcataggtcagcaagtttttaaccgcttgtaacagttcatgatcttctttaccgatgataaactgatttggttctactgaatcaatgttcagttcttcgtctttgttcattttgcagccttatacatttcaaggacgcggttcatatgctcttgtgattgaggcacacccgcgaagttcagtttgatgaagaattccagacgatcctttttggtgcattcatccagccccagggcaggtaatgaaatgttttcaaaggctcgctgttcgtgtcgtggcatttcgtcccagaacaaacgggaaccgtccggcataggaatcccaatttcaccttcgtagactttgataatcgtcgtcaggcgttgtttaccgtcgatgacttctacccagtgagtttcgttgaactggctatcaaccgcgatcgcgatgataccgcaagggaaaccactgatcagggtagtcagaaacgcatcttgctctttctgcgtccacacataggggcgctgataagatggattcagatccagatctttattcttccaccaatgcagataactcccaaccatgatcgcgtgatcgcgactgcgaaaagttaactgatcgcggatacggttatgaaccggaatatcatctttagacatgattcaccacccaacccaacaaaccagtattgatagccgcaacggtaaggcaaatcacagccaacacccgcgcgttatgaactttagttttcagttctgcgatctcctgatccttttcactttcgaactcgtcgcgggttccatagtaaccaggatcagcagcggttgcgatacgcactttgtctgtttcgaataatgttgattttccatgatccggcccaaccacacccagaataccatcacggtcggtattgacaattccgtgcgttccggctttggcaaacttaccatccttaacggttactacacgatcgccagctttgtaagtcataatatatcactctttcacgttttgttgtaagaactctaacagctttccttcggcctgtaaagcataaagtttattcaactttgcgatgttttcaaagtctgatttttcgctgaacgaccagacaccatcatcggaaaccagcgcacctattgatacgccagtttcaggatcacgcgtcaacgccagccccaggggatgtaggatatctttattgattttccagatcaaccccaattgagataaggtgttgaaatcaacgtgactcattaggcatcgcaccgaatgacagcagccccatacgatgatcgttatctgattcaccagtgctgaattcaaattcttcaccgctgatactgatagcacggaaaccatctttcaggtacggcaacagatacagagggatcagcatcatttttgaatcgtcatcccacttacggaagcccaggtttttcatttcttccagagtcaggtcatttggatcgactggttcgaaatcaggggaagcgtaaaggcgtccaggcagatcgcgaatatttttcacggtgaatgaatcaccccatgactgatacgcgataggttcagcggcgcgggttgcggtagccagaaggatcatttggcagatttggaaagtagttgcttttggtttcatgatgtatatcccacaagtttagtcagtaaattccccatagtcttacgcgcatgatcgcggatctggctatacggaacatatttgaagtcatccatttcagtaatggttcgaccatttttaacgaaggttgaagcacaaacacatttttctgcttcggggtaattattacccacatatacgaataacacaagctcttttttactcgtataatcaatcagacccaggctcaacagttcgtgttgttcaactacaacgcccgtttcctcgaagcattcacggatagcagcattgatcggggattcgcctttttcgatatgcccctttgggatgtcccaatgaggcgtttcggttgcgtggcccattaaaacgctgccgttattcaggaagagaataccagcagaccgttccattactgtgctccgaacttacgatcgtatgctgccagcgctttatctgctgcatcaactgcctgagtgtgtttgttagcggatttctcgctgaacacttcgcggtaaatggcaacccagagggatcggcgggtctgttcgctttcttcattgacgcgagaagccgcaaaagcgttatgttctttgatcagttgtgcgaattcagcatcatgatcaatggtttgttgttgaatagctgtagaagtcataattcacctatttctttcagttcagttttgagtttttcgagggttgattggtactgaatgccgttcacaatgtcgttgcgtcgggcataatacagcgtaccagttttgtttatctctgccaacacttctttatcgagtttatcaggttcattgctaaatgcaatcctgaacatttcttcggcgttcggcgcgaatccgttacagaacgtgataccgagtttcggatcgaagaatatcagggatactttattcactttttccataatgttcttcgtaatcctcgcattctgggagataggtttcgcagaacatacacagcgtgaagaatgtaggctggcgaattccgatattatcgggtaagtacatccagaacgtgttagcaaacacgatgaacgttttcaggttttcaacggttacggtactgataccgtcataaccggattgagtaattgcgcgttccaggggaacagggtattgctcgcagtagttggcgtaatgttcgcttgtcaccagcgcattagccgcttttacgagatcggtaattttcattcaatatatccccaacgaatttttacgttatcttctgacgccggacttgtaggagtcgggtacggatagctttgcgcttcccacagataaacaacagcatgttttgtcaattcttcgataacttcatcgaaagtaccgacactggtttgtaaaggcaacgagaaaggtttatcgttggtttctacttgagcgattggcccatctaccaagataacacgaaccgttgtgtgctcagacatatgagcatagattttgtttttcatgcgggtacatattccactttgacaggttttgcgataaggcgttctttagtgaagccttgcccgttacagatatcacaaacgtaactgatatcttccatctgatcaacccatccagaatccggcaagccagaaggatatgtgttgacacgtttgacttcaaaccctttaccttcgcatttagggcatacgtgcggatacttcgctttcagttctttggagatctgacgcaaagttttctcgccgccgaacacagcacacaattgctgtaaatcagggattcgaagatcggcgggagtaatcacactaaatttcttcatcatatatttctcacttaaagaattttttaatgaaagagaggaacaatccaccactgaacatgatccagtatcccgcgccgtcaccgttaaacaggacatacacagcgacaccatagcaaaagatttccgcgatattcagtaagtttctcataactccctcctttgtctacaccaggtattttaccagaaagtagattactgtcaacaacaaagttttatcaacccacttatcaccagtcattagtaatcccctacaggttgagaagatgcaacgctcaggatacggaaagagcattcattccatttgcaataagttttcgcacagtgaacagtgcctttcattacaaacccgtttgagaataccagccagtaaagtttcatgattgcctcctttgtttcgacacccctaatataacaaaagcccctgcacgaatgcaagggcttttttcaaatatttttcaacatgtgtagttgaggcggacaatcttttgaagcaatcaggcgatccaggcgtgacataacgcgtctgtagccgtcatactcgaacttgattttgggtgcgatgtaatttacatgtatcgcgtttcgcgtgttcaggctcaatgtatactcagggataacggttcggaatcgtaaagcaatcactggcttttcgtgagcaaccgaatcatccatgttttcgaacatctggacggtgaacgcacaggcaaacactttgccattaatccggcgatatgcaatgacttcctgcataccttcgtttttcgctttcaccgcgtaatacagaacgttacacgaataatgtttagcgagactattaagaatttcactgtagatctcaaagtcttttttgactgacgcggaacgatccaggaatcggtctgcgatgtgatctgtagtcattgaaacctttgtcacataccaatcacttaacgctttactgaaattttggttaacttctctgcgtaagttattgataacatacatcaatcgtgctctgttcataaatcacccattatgtttaaagtattcgatttgacgcagacgtttttccgctgcctctttcgaatcatattcaccaagttctttcgtgcgatcgtggttcagtacaacccacttatcgccgcgatgttcgatgtgctccgtgatgtcttcgactttcttatccagatccagcggttcagcatcttcctggatgatagtcaaatctacgggcaatgtcaacagtcttttaactccgctgatatcttcgatgcgggaatcatacgcgagggttacatgtggtttgtaatcgtcataatcgtatgttgctccagcatccattgcatctttgaagcggctatggagataatcagactccagaacgcccacgatcgtattaccgtatttcgtttcccacttctccacgtcaaccagtcgggcaggttcagagataccggatgcagggaacagatcaaccgtcttacggctatacacaatcgttgtatgcagctttgcagcggaaacaggattctctacacccagaagtttttgcaccttcgcgagcgcttcacaggaagcctgatcgaacttcgcacacatatagatccccgaatcaactacgggtttcgctacttcaagaaaacttttcatgtgtactccaaatgaaaaaggggctttcgcccccagtggttaaacgcctaagcgttaattatgcttttgatgcatcaatcgcttcattatcaccagcgatttctactgttgctggcagaagtgctttgatcgcgccgatcagggcatcaggggatacaccctgcgaaccgtcgatttccagaagaccgcaaatctggcctacgagttgacggtgatttgccagttcttgttctttaccctgaatgatttcgttcaggtcgaatacacgggctttcaggatcaggacatcgttttgaagctgttgggtttggttttgttcagtcattgtttacactcttaaaagattgaatacattaagcacgttacgtttcaaatcgtctaacgtaccattatttaggattgtataatcagtcaagccaggtgtcaaacctttctccgttgaatgattatcttcaataccagtttcacgttcaaggaacacaaagcgagtcccgaacttgctcaggtatttatattcgtgcggttgacgcacatcggtaatgataaagtgatccgcgtaggatttcaacattttttgaatagcaattgaagtccatatagacggatctattttacaaacaatatcagtcccgaacacctgcatcaaacggcgaatcgtccagggctggctgttttcttcgcaaattttatgagcgataacatctgcgttactcatgaagaacccgcgagaacttaattttttgataccgctagaaaacagcgcgtatgcatcgttattggacatcaccagcggggcttcacgatcaccctcatagaatgggttcttcgctgccagcgctcgcaattgcgtgttatcgtgatgttccatagaacgtttcaggatagctttgatttcgtcggctaacgcgataacttcaacattacggaagttatgcacaaccatttgagcaacggtatctttacccgttcgctttttaccacaaataccataaatcatttttgcgttttccgtggagtaggcacgatcacccgtccgtcgatctcaatttccatgtgagcgaagttgaacatcgtcatacaggatacggcttcatccgaatcattggtatacataagctcaagctctccgaggttggagggccaagcgccatagaagcgaaatgtcgctacagtttttgactgcgagttatccaggatatgcaaagccattgcctgttgtggttcactccaacgcacggaatcgaaggtgttaaaatcgacagtaccgagcatccaaaggtaaaccccaagatacgatcgcagttcttcatcaacagcaaaacgaatagtcagtggatcgaactccattgcagatcctgggatcttccctcgaatcattgggttcagtgggacatccgtaattggaatgttgatagcaggtagtgtaacaccctgaacttgtagtttcaacccttttacataatcattgtcaggaatatctaacatgaagttagtaggtgaaatctggttcaggatcatagcagttgtattcatgatgatctccattttatagatatttagatcaagaccgtgagcgaagcgaacacacgaacgaagtgagtgttatgtacgatgtactgtttataatatttatattttatatatagagaaaacagtacattttcgtatactttttatacaatcgttaactatccgtcttcgcttcgcttgacggaactcgcttcgctcgcgatctaatttttagttgatctattcaataaataggtatatcatacctatactttcaaaagagattgaaaacatgaaatcattcaaagaactactttctgaatctgttcagaacaaaaaatttgctaagaccgttgatctggttgaccgtggtaacgctgcaaaaggtcagattggtttcctgcattttgcacatggtgctgattacgatgtgtatgcgccggactcccacgatctcgcttacttcggtaaaggtgttgtccgcctgaaaggtaaaaccactggcaaaactcaggcagcgtatattgactgggcgaaaggcactgtttcattctacagcggtgatcctgctgatgacctgaaatttgacaagccactgaaattcaaaggcgcttccctgtacaaagaggccgaagaaaaccttgatctgtataatcagttggcggaagatttcgaaattgatctgcctctggatgaagcattggtgaaaggaaaggtgtacaagctcccaagtaacgatatgtgcttgctgtataccggacgtaccaaaaccaaagaaacaggtgaatacgccgtgtttacggttgtagatgcctctggtaagcctcgtctggtatcgggtaaacgctttacccaagaatacaaaggcgatgttctgtctaaactggttctcgctgaatcggaagatctgaacgaagccgctaaagatattcgcgaaaaagttattgcggtgttggtgaaacgtgggtttaacgaaaaagacgcagaaaagatggttgataaaaacctgaaagatgcgatgaaggttcgacctggcgcaacccctggaaaactcgcggaaatcgtgagtaccctgtaaaaataaagccccttcctttcggttggggctttttgttaatatctgttccaaactttcttcgcgctgtatggttttcctttggactggaaagcctgtgtaggcaaccaaactgctttcgcccaatcttttggtgcgatctctgcaagtggtgaacgtagatgggctggcaggtaggctttgatcatttgatcagccccgcgcattcccttcacgttgttccagttgattttcagtctggttttgttagaaagtcgatctgttgatccgtagccacgtttcaggagttcttctaaaaactcttgacgtgctcgcggtggcgcatagtgcaagttcagcccgtacagaaccaagttacccgctttcgaacgtcctgaacccaggaaaatgatcagcgggaaccgatcccagtatggcagggtgtctttgtatttcgcatcgtagatgaacgtatacaagcgacccgttgctggtttcgcaaccctgtgcgtcttaatgctggttttgatgaaatcaccaaaccaatcggtcgaatctttctgacgtttcgcagcggttacaccaacagtcattttcttcaaactgttgcggaaatcgtttacgatatcaaccgcgtgttttttgcgatagtcattacgtttgcgtcgggcttcggtttctgctttacggcgttcgatttcatcatcaatctgctgcttatagcggtgcatagactttgtgaacgttgcgtatgcaatcccgttttcgtccgcgaactttttggctgtcatgccttttaattttgcgcgtcggaatttgataccaagttcaacccattcacccagctttcgcttcggtggcggttttggcttgtcttcttctgcgatgatctcgaactcaaaaataaaactcataattccctccgtttagggtatttattgccctttccatccgaacacacgtttcaatgtgtcctctgtgatgatcttgaactcccagcccttttgttttgctgctgcattcgcggctttccatttgtcgatgtttaccgcataagtatacagcgcatcaacaaatttctttttgttgtgaacgttgttgttcgctggcttaggtgggggcaacgtttctttcatcggtttgacttcccaaaggtaggtcacaccgttatccatttcaacatagaaatccatgaagtagcgccgtcgctttccgtctgcgttgctgaaataagggatcacaacctcttcactgttccagcgtttcacatgcgggtttttatcaagccagttcataatatatttttcccagcttgaacgatacgttatctttcgcggatctcccttatatttctgtatgttctggggcataaaagaccccttgtatgtctgtcttccagccattttagatcctaaatatagtaaacattagataggggaaattacaatgttattttcgttctttccaccagttgattacaaaggcacaccaactactgatatctaccgcgattatcgtttttactttaaccgcgtgatcaggaattataagccgcgtacatatcaactgacaggttcattaagacccgaacaattagcggaaacgctatacggaaaccagcaatactactgggttatcctgatgcttaacgataattacgatccgttttacggatggattaccgatcaggaaacggcttatcaatgcgctatccagcgttattcaaaagcaggtggtgaacaggttctttatcatatggatggtaagggcaaccgttattacaatttggttgaagaccctacgaatcccggtcattggtatgacaaaggcgataagaacatgcgttatttgcagtaccagggaacattagtccctgtagatatttatgaagatgcggtgcttcaaaatgaagcaaaacgaaccatcaagattattaacccctctgatattcaatcgtttgtaagcgattatatcaaggaaatggaaaaggcaaacctatgaaatacggtggaaataaatactcccctttctttgagggggtggtcgaagaagtcgatgatcctcgtctactggggcgtgttcaggtgcgtgtattcggtgagcatccggcacagaaacaaaaatctgaaactatcggtattccagttgaggaattaccgtggatgatgcctattcaggatattcgcagcgccgctatttctggtgttggtttttccccgactggtatcacgcgcggtagttttgttatcggttactggcgcgataaatggcaccaggacggcgttatactgggaacctttgcgggtgagtaccgagagaagccggacacccagaaaggcttctgtgacccgtttggtgagtatcctcgttatgtaggtaatgatgtcaacgtactggctcgcggtggcgcagaggggcgcggttcttcgagcgtgattattcgtgatgctaacagttcgttagctgtcaatccagatgatcgcccacttgacgagatcccagaagataaccgtcctgatactggcgggttcactatcgaaaccatgcttaaacaggatgaaggtatccgcacaaaatggtatattgatagtgaaggttatccgactatcgggatcgggcatttgcttatcatggaaaaaacccgtgatactgcgaagattaacgccgcgatcagtaaagcagttggtcgagaagtaaccaatggaacgatcacagcagaagaagtttcaacgctgtttgctcaggatttggcaaaagtccggcaggggatcagcaacacttcaaacgttcgagaagtatacgtgacgttaaaccgtcctcgtcaaatggcaatcgaaaacatgtgcttccagatgggtgttggtggtgttgccaaatttactaatgctctggctgctatgaagcgtcaggactggcaaaccgcttacaacgaactgcgaaactcaacatgggctaaccagacaccaggacgttcttcacgcgtatctaaaatcgtgctgacgggcaacctcgaatcatacggtgttcaggttccagatccagaagggcgttcattgagtgctgcatacaatgctgttgtgttggctgcatcaaacccagaagatccttttgttcctggtgatactcgcgtaatgttcgaggaacctaaatccgcatacgctgctgaatatccatacaacatggtattcgaatcccgttctggacacattcaggaattcgacgatacaccgggctttgaacgttacaaccgtgttcacccagcaggatcatacgaagaaattcgccctgatggaacccgtgttgttaaaatcgttggtgatgattatcaaatcgtcatgcaaggccgtaaattaaacgttaagggtaatttacaggttgttatcgagggtgatgcgttcatttataatatgggtaacgttcaacagaccgttgatggtaacgtgaccgagttcgttcgcggtaatgtaaatcaaaccgttgaaggtgaatatttggggctgattaaaggcaacgcagaattaaccgttgaaaaagatgcaaccgtaaacgtgaatcagaatttaatggctaacgttaaacagaatgcaactgttgccgtaacagaagatgcaacaattaccgcaaaaaatgctctgattgatattgagcaagatttggatattggcgcacgtaatatcaacatgcgagcatcgaataatactttcattgattccggcgcactgactaagatcactggcggaacagtccaagttgggtaatgtatgaattataaacgcatctacaaagaaatcatcgagaacaggagaaataatcctgttagtggaatggttgaagtacatcatatcattcctaaatctatgggtggtgacgattcagagggcaacttgattgccctttcacccagggaacattttgttgcgcattatcttcttgcgaagattcacaacaacaaatctatgtggtgtgcgtactggtttatgtgcaatacccgtgacgtgaaaataacatcacgccagtatgatacagcccgtaaactttcgagcgaacatttgaaaggaaatactcatacgctggggcatactttatcgcaaagtcatcgcaagaaaataggcgatggtgttcgtggagaacgtaacggaaactacggtaaaactttttcggaagagcataagagaaagattgccgaaagtagaagagggaaaccacacgacgaagaatcccgtaagcgtatgattgaagccgctaaacataaagaaaaagttacctgcattcattgtaatcgtgttcttgacaaaggcaattacaagttatggcatggcgacaaatgcaaaatgaaggtaggctaaacatgatcatggattatgaaaccatcattgatgggattatgcaaaattttcagcatccttgcgatgctgagatccccgctggatattacagacgcgttatctggcagggacacacagaaaattaccctgctgttggggtagaatgggcgaccgaaatcatcccgatcggaactcacctgtatacgagttcccctttcggacagaaaagcgatccgcttccggtggtgaactctccaaacgtacccacgaatccagacggaaccccaggggtttctactgacattctggttacgaagattggttattatttcgccagtcaagcggatattgatgcctatatcgcatctatcggggctactaagctcgcgggtaatgactggtacggggcggatctatcaaaagcgaatctgttcaagaaccctggcgaactcgcgatgtacaaggtggaaaactccggtggttacttgctgacttccggcccccgttgcgatcagcgaatccgacaggtatacaaccagactacaggcgcgtttaccagcattgattactactggaatggtaatcgtattgcgtacatgaaacacgacgaatcccccgcacaccagtgcaaatatacagggatgtcagtaaacacgaacgcagataccagcattcctccggttcctcctgctctcccgtcaacgtatggggcgctaccgagtgaagccagattgttttctgctcgctctggattgggctgtattccggcgaccgtggggttcccgtatacgaatatcagcgatgctatgctttccgcgtggaacgagactcgtaaaacgttcaagctggctttcgatatgctgacgggtacaattaaaaatggctctggtatcgcgacgatgtttgacgggctttcaatcgggatggaagaaatcacagcgggtgctctggcattgtcacagcaagcatggcaaaccgcaatgaaggtgttccggcagatcattagctctgcgtttaacatcgtgggtggggcatggagtctgatcaataacttcctcccgactgttgcgatcctgggtgttgcaatcaacatttacgatctggtgtttggtgatagttcggttcaatccctgaaagattctttccaggctctgattgactccggcgcacagacgtatgaaagcgtcataaacgcaatctacggggctataggcagttcttacaactacaccgttgaatatgtcaaggctggcgctcgcgaccttgtagacgcttgtagcgcgttatttgactggtgtttgactatgttccaaaacggttgcgttgctctggtggatttgtacgggcgtatgatgcagatctggtcaatgcctccagaaacaccaaacccgctttggtctgcggtgctggctatccgtaacatcatgcgacagattaaacctcttgatgtgattctgggcggtaacttcccagggtttacagcaatggatctgtatcagcaagcacaagcgaaagtgaaagcgttcattgatgcatcctatgcgcagatctccgcattgtatgatcaggggcaagaactattcaacaccctgaaaacacagacacaggaaagggattcgattaaacgcaagttcgatcagtacctaaactggatgtgggaacctgtaacggaagcaacaaccgctgcttatcaggctgcacttgatgccgctaacgctgctgtgaatgcgactaaggccgcatatgagggaatcaaagcacagattgctactctgcaagatgggatgaaagacacctacagcatggcaatggctgaactcaaaaaactgcctgtaatggctcagattaaccagttcttaggttactgtggggttgcattcgatgacctgttaaaaacgtatgagaacgcgctgacgggcgcacaatcgctatataaaaactttgttgacagttcccgctcgtttaaggacacatgcaaggtgatttataaccagatttgtacgcttgctctaagtaaggtaactcaatacgtaaacaaattattgtcattaatcggactcgcgatcacattcggttcaattagtgtttgcgtccctatggttcaatactaaatacccgataacgaggggtaataatggctactacaaagaaacaaattaatcagatccccgatatctttgtcggggctacttttgacgaaatcaaatctgacttaatcaactggctccgaggtcaggacgaattcaaggattatgatttctccggctcgcgcatgaacgtacttgtggatctgttatcatactgtacactgtacattcagcaaatgagtaacaccgcactgttcgaatcgtttattcgtaccgctgcattgcgtagttctgttgttcaacaggctcaggatttgggctatatgccggactcccgcaccgctgcaaatacttcgatcctgatcactgcgaaaaacccactgaacccaacatcgatccgtattccacgcggtacgaaattcatcggtacagtgaaagaaacaaacagtttcccgttcgtcgtatccgatgacgtggtgatcgttcgtgacaaaaacaataactatgtttcgatgttgaacatcgttcaggggcgtttagtccgtaccgaagtcatctttgatggttcgactatcctgatccgtgatccaaacatcgaccgtagccaggttcgtgttaccgtcaacggcgcacaatgggatgactggacaaacgaaagtatcgtaaacgcaacgggtgcatcaactgttttctatatgcgtgaaactgttgatggacataccgaagtttactttggtgaaggtgaaaccagccaacaggtcgcgggtggtgctctgactgctgattacatcgggggcttgaaacctgcaaacggttcaaccgttgttattgaatatatttcaaccaacggcgaagaagcaaacggtgctgaaaactttgtttacgtggatacgttgacaaacattagcattacgagtattgttgagaacccgactaattcagcggactatgtaggcgctgatggtggtggtgaaccggaagatatcgaacgtattcgcgaactcgcgcctatcatgcgtgagacacagcgccgttgtgttactgcatcggattatgaatcgttcttgtctcaccgtttcggttctgttattcaggcggttcagtgctttactgataaagaaaaacctggctatgcgttcatcgcggttaaaccgaaatcagggttgcgtttgacctctgttcaaaaagaggatatgcaaaactatctggcgaagtataaccttgcgacgattacgccgtcgatccttgacccgaactatctgtacatcgtacaaagtatcaaagtaacgtatgatatcagtaagttggttgaatcagaggaatggttgcgtggtcaagtaatcaatgaggttgacagatattatactgataacgttgaaattttcaacaaatcattcagtaagtccaaaatgttaacctatgttgataacgcggacgtgtcgatcattggttcttctgcgactattcagctattgcgtgaacttgataactattacagcgctccgatgtctggtattcacttcttaaaccaggtgaaatcacgttctgttgtttcgaacgggttcaaatacacaaacgctgctggtgattcgtatgatgtgcgttatgcatcaaccgatatgaacaccacaaccggacgtgcaaaaattgttatcgggccattcaaaaacggtgatatcagtatcgcagcctatacaggaaccgattttgataaatatcctggagtgaccgatcgtaataaatattacgaagtcggctatgtggaacactacactgatttcattagtttcgatctgggtgtcctgaacgttccatccgagcgattcagcgctgcttatatcgaactgactggtacaccattggaagagaacattttcacccgtgatggttctctgattgtgtttgaaaacgatctccgtcctcaatatacaacattgacaatgaatccaatcagtcaataattttaacccctgtcatccggcaggggttttttgtttgctaaatatgggatataagtaacgcaaatttggagaaacataatgattaaagcgccgtcaattaccagtttgcgcgttgataaactggctgctaacttcgtttatttgaagtgggatagcgtcggcatggatttttactatgtcgtggaaatggcagaaactcgcggggcaggtggtgttactattccagatgaagatttaacctggttccagttgggttacgcttttttgaatgaatggttttcttccgatgtccagccaaacaatttttataaattccgcgtcatggttacgcacaagggctttgaaccgtctgattgggtttatacagatgaattatggacgttcagccttaacgcctacgcatattcaacaatgcgtgaatttacgccaagtgatgcattcataaacgaaaaattcgcaaagaacaatcagaactacgttaacttcaatacagatgtggtaatggcagcgttgatgaaagaagactttgtgttttctccactttacactgacgtatcccagatcagcgataaaattcttacacaagaaaactatcacgaaatccaggatcatattgaacacgtttgtaatgacattaacagaactttcctggtagcgtcaaacggtttgctgtacctgtttgaacgttttcagaacatggcaaaggtgtcaaacgacaaagggcagacatggcattactacaaagcatttaacgaccgcgtaggaaaccctgtatcgcgctctattgcgtaccaaagccgaaacacaacctatgtactgggttacgatcgtatcttctacgggcgcacctcaacggatattcgctggtctgcggacgatgtgcgattctctgctgatgacgttacgtttgccaaactggggaaccagactggccttgatttcgacgtagactcatacaacacattcgctaaactgcctggtaacgtgtcgaaatatgcagaagcaatggcatgttccgatgactggctttatgtggttgcgaaaaacgttgtgcgtcgtatcgcactgaaacagacaccgatcgacaccgatccgagttctccgacgttcggagaaaagattttcgatacagcaagctatacagttgtccctggaaatgataagatcgttgtcaagaaaatggatgtgatgaacgggattctttatgcactcgttacgggtgaagtgaaaaccgctctgcaagatcctacaaaacccgctaacgtggttccgtccgctgctgctggtgtgtatcaatggaaagaagacacgaaaacctttgtgcgcctgtacgggaacaccgagaaagaacgtttttatatccagcatgaatacaccaatatgtcaacgaacggcacggagatttttatttccgtagcaaactacaaatatccaggcacacttcccgatcctgaattgttgatcgagaaccctgcactggtcggtgctgtaaaatatgatctgcgtcctggctatactgccagccttgcgattaactttgcgacgattcgcgctcatatcgacgacccgactgtttggaaatttggtgcgcaggaatactacaacgaggcgaattatagctggttcttccgcgactctgtgcgcacatggatcactaatgataaccgtcctctggtggtgtatccgaaaatcacctacagccttgtaaccgatagtgctggcccttcgtcatcgcttcgtgtgaacaaagaggtatgggatcgcggacatgttacgatttacattaacaacattaagtttaccggattcacgaagtatacgaacggcgtgttgctatataagagttcaggcgaaatcatcgggttctttgaactgagttaccgcgctcgcgataacttaacgattttctggaaaccagacaatacgttattgattgccgatctgattcagcaggaacgcgaaaaaccgtatcaaccggatctgtcacctggtttgattgacccagatttaagccatatgattacgcgctttgcgcctcaaagctatctggatcagcagtatttcgagaagttcggggaatactatttgcagttcgtttcgctgggtgaaaacacctactataacaagctgcttaacctgatcaggaacaaatatccgcgtgagaagaacagcgtagaatatctgtggtcggaagtaaaccgccgtaatatctacctggataaaacgaagcgtgatcaggtggttcgtttctttgaatctcgttgtagtgatttctactcaacgaaaggcatcgaagcaagctataaattcctgttcaaactgttgtataacgaagatgtaagtgtagaaatcgaaagttcgaacactctggaatatgatattctggttcattcaacaaatatcaaccaggatattgtaggccggacgatttacacaccaacagcgagagcaaacgtgacgtatatcgaacgccagtatgatgacggtcaattacgttggtcggtaacgctgcacaacgtgatcggtaacttccttgaagggcaggttgtcaagtctgaaaagactaacttcacaggtactattctgcgtggtgtgcgtggtaagcaaatggcgaacaactcgatcgactacttcaaccgtgggcgttcttactacgtgatgaaaattcgttcgaatctgccagcgtcccgttataaggatgacgttttacgattcgtgcatccggtaggctttggctttatcgggatcaccatgctaacggtgttcatcaactccggtttgtctatgacgcatagtgaaacgatcattgacattcttcgaaattatcgcttcgatagcggttatccgaagtattggcctgatcgcgtagcacgtctggacggtaacggaaaccagacatttgaccttgtaactggtgaagcattgtacgacccgcacccgaaagcgggacaaccgtttgatgttccgccacaatatgacattgatgaaaaaccgctgaatggtgtactgccgtccgcgcgtcgatttgatcaaagtcctctgttcgatagttcagcggttaaatactctcagttccgtaacttagtggaaaaacgattgaaagacgacgcgggtaatcctcgcgatccgaatccaccgactcagagaaaggtagcataatggctcaacaaaacatctaccgtgcggtcgtaactggtaagttccgcacggaaaacatgatgaactttcgcgaaatgatcggggacacccccgatcataactcgatttatatgtcaatcgggcgtaccgaacaatgggcggataacgaatccgaccctgaattcgctcccccttatccgaacgatgatacagatggtatcgttgatatgtggacgcatatgatcgggatgacgaaagtaccaggcgaaatgattgatgcaatcgttccgcgtaaagactggggcgatactcgatatccaaacccaaaaatcttttacattaatgacatcgtggttgtaaactccgcgccttataaccgtactgactacggtaaaggatggatggtataccgcgttgtagacgttcctgatattggatcttgttcaatctccagtatcacgggtaaagttgaatgtgtgcgcattggtggcatttggacaccgacccacgaatcgatcgaacctccgcgcggggaagcgaacggtatcgacatgggcgacggctatatctgggaatatctgtatacaattccaccagatgttgttatcaaccgctgtacaaatgaacatatcgttgttccgttccctgatgaacttgaagaagacccggttcgttggggttatgataacgtgatcaaatggtatcctgatatgtacgatttggtgtaccgaatgaaggttcactcaatgcgattccgcgcgtatatggattccctgttcttcccgcaagcctctttacctggcaaccgtgggttccgtcaaatcagcgttattgtaaacccgctgttgaaaaaggcgcaaccatccgacccagaagtaaaagcaacgaggcagtattacacgaaaggacagcttgaacttgactcaggacaaatgatctacatggaaaaccgtcaaccgattattcgttctcctgatcagaccgaagaagtcagtattattttcgaattctaaggaaaccataatggcatatcaaactggtaaaaaattaattgacgtggggcaaatcggcaacccgtcaactggtgacccgctgtatgacggcggtgttaaacttaacgaaatcatcaccaacgtatacaatgcgtttggtgatgtgcgtttactgactgcgaatgatggtgtgggtacaatgttactccacgcgaccggatatttccagaaattaccgcgaacctattattcaggaaacccgattgaactaggttcactgcatgatatggatacctctacagggccaattacggttgtgcttccatcgggtaaacctggcgaggggttctatttcataaatagtaacggtagtatttctgttgatcgtcctgttgtattccgtccgcaagttggtgatggtatcaaaggggttcaggatcaactttacgtgacctctccatatactcagattaaaatctggtgtgtgaagaaagaaggttccgttactacatgggattattctgttgaatcaatgtttggttcaaaaacaatgcctgtagatactactaaactcattctgaaagcatcaccgaccgcaattcctttatttggttatagtgaattcagtggggcgaaaattctcgtgtacgcggagaatatgacaggcacagtcaataaaatggctgaaattcttttgtctgttgaccgtgtcgctaagggcgtgtattcaactgaatacgcagttctcaaaaatagcgaagatgaaatgtacacgcttacgttcactgttggtgcgagtgatattgtttacgcaaacgtacaatccaaaaccgagaatcgcattaaattctcgattaaagcggttgacaccattaaatcagggatcgcagcatgaaacaagaaattcttatcggtaacgtggttgatgacggcgcgggtgattatctgcgtcgtggtggtcagaagactaacgccaactttaccgaattatataataaactgggtgacgggagtatcccgcacccagcgggtgcgtggaaaacgcacacagcgcctacgctgacccctattttcggtgaatcatgggcgctgaataccagcaacaaccgtattacggtaaacctccctaaaggcagtgtaagcgattataacaaggttattcgcttacgtgacgtatggggtaagtgggcggtaaacaacgtccgtatcgtccctgcaagcggtgataccatcaaaggctcaccgacttacaaagaactgtacaaagacctgatggacgttgaacttgtttattgttctcctggacgttgggaatatgttgaaaacaaacaggttgacaaaatcacaacttcggatctggcaaccgttgcgaaagaaacgtatatcgcgactcagggacaaactgacttcctgaacgtgttcggccctggtaactcgtacaacgtccgcgcactggaagtttactatcgcggtaacttgctgtacatcgacgacaagagcgggtttaattcatcaaacagcgattacggttcacctggtgcgagcgccggacaactggtagatctggatggtgtaaatatccgtcttaaaaacccgtgtaacgctggtgacacgcttcaattcgttacctatctggatggtattgctgcatggcgagcgacgtatgaagcgcataccatgcgcgtatataacacgggcgacacagaacaggttagtatccctggtgaaatctgggttggtgatttatcaactaaacgcacgtttactaatgctgaatttgggatcagtccccgaattttgattaacccaaactcgttcgaactactgttgaacggtcgccagcttgttaaagcaggtgatgcggatctcccgacatttgtttgtgagggcgcagaaggttatgatgaaagtagctgtattgcgaactccggcgcatgggttccttctggacaggattacagtctgatttttgttaactccgtggttacgggtattaaatttgctcaacctctggaatcccgtgatgtggtaactattcgctggttcaacaatgatatcggtactgtcatggaatgggacggtgtaggcggtattaaagaacacaccgataagatttacctgaacaacgaagaagaagtgacgctggttaatcagattgaatataccgattataacaacccaacgcagaaaacctcgcgtaaagtagcggatacatttagcggtcgtcttctggatctgcaagcgttctttgatgttattcacccaatcgggacaatctacgaaaacgcgcataatgatgctaacccaggtgattatatgggctttggtatctggacacgttacgcggaaggtatgttccttgcaggttggacaaccgatgcatcggatagcgattttggtctgaacaataacgatctggacggttccggtcaaccaactcacacttctggtggtactggtggcgaacgtggttatgaaattaaaccgatcaacgttccacaaattcagtcaaccgataaggtgttgattaaagatgacaacgggatcattattattggtggctgtcaggttgacccagatgcaacagggccaggttacactaaataccgcgaggatgtattaaaagtaaatcgggggaacactactccagataaactaaaaacgctcccgccttatattactgttcaccgctggataagggtagcataaatgactcagtttatttccaaaacaagggagggggcgaaagtcccttcccgcaaagcagactttttgcaatatgaaatgggtacgaaagaaccgctgattggcggtaaacgtactattggtggtgcaaacgtcgatcagcttcgaaaaggggtagattaccctaacgtacaatcagcaattgatgacctgtattctttgtctcaacagatccccatcaatggggtaatcatgatgacggaagatagccccccttctgcggtgcaacaggtagaatcaattacgtttgatgggacggtttcaaacccagatccagatcaaacacaggcgactattcacgtttatggtttcccgttcgttttcggcaatacaacgaacgcctctaccgtatgtgagacagtctataacaaattcgttgaattcgtcaacgatgaaaaatatttcgatttggttactcgtaaaggtctcaacggggaaattctggaagttcgttttattgattcagttccgcatccggttactaataaaactgaatatggaatttcgatggtaggaacaatcgacgtacaggctaaatctggttacggtacatggacaaagttaggtgaaattgaccttgctgttactccagcagttccgatttattatttcaagcgtattgcatgaggataacaaatgaacaatacaattaaccacgtaagcgataaatccgtttacgtgacatttgatcctgctggtacgcaatggcctagcacgtttaagaacgtacaacaggcattagccgctattgggccgtgggcgcgtactgatgttggattgcctaatgccgcgcctggtgtgcgcggtattgctgctattgcgacacaggcaatgattgacgcgggtactgacacacagacgattgtaactccggctttgctggcgtatcgtttgcaaaaccctcatgcatcacaaaccgtatggggttacactcgttacgcaactgatgtagaatcagtaacagtaacaaacgatctggtttctcttactccgcgctcgttgaactatgtgtttaacacccgtcaggcaaaagaaaacgtttggggttctgcgaaactgtcaacaactgctcaggcaacgtccggtactgatgacactaccgcaatgactccgcttaaagtgaaacaggcaatctctgctctggttccggtacagtcaaacgcaacagaaagttcgtttggtcttgttcagttagcaacagttgcagaagttcgcgcgggtactattcgcgatgggtttgcgatttcaccatacacgtttattcgtctgactgcaagcgaaagtgatttaggtttactccgtatcgctacccaggcagaagtaaacgcgggtactgataacaccaaagcgatcaccccgcaaaaactcgctgctgtgaagggttccggctctactttcggtatggttaaattaacaacagatatcaataccggattagcgaatactgctttgtctgctggtgctaacgtagtaccgagcaacaaaaacagtgcaattactggtggtgcattgtatcagggttcgattagtgctgacaataaataccagacaaagacagatgttgacgcaaatatcccgatcggatgtatgatgcttgcagcgtttaacgccgatgttggtaacttgtttatctgtaacgggcgagcgatgaaccgcaattcaaacccagaactgtttgcccgaattggttatacatacggcggttctggtgatattttcaacttgcctgatatgcgcggtcttgtagctcgcggctttgatggtgggcgtggtttggatgcaggtcgcggttttggtacatatcaggctgatatgtttgcgtatcacgaacatgatctccagatgatttaccagaacggcggtaatcttcctaagagtcaagcagtttatgaactgaaaggcgcagaaaagaatgaccaacgtgttatgcacctgaataacgattacagcaaagcattaggtactggcggaaacgaaacgcgaatgaaaaaccttgcggtcaactacgtaattcgagtacgataaaggggttaatccatgatttcaaaacttaacccgttaccaaagatcccgtttgttgatggtgtccctgcggacaccacacaaacccagatcaattggattgttaacggcgaaactctcgatggtgcaaaaaccaaaaccactaacgagggttctttaaacagatgcggtgttctggttcaaaagaacgcggtacaattagaagcaaatacaactacccagacatcaaaaatcaacgaagttatcgatcaggttaacctcattactgaaaacctcgcggcgatctctgatgatagtgtgatcgacaaactggataaagttgtcgctgatgttgacgtgctgaaagtagatatgtctgctgtacaggcaactacagcaagcaacaccctgaaaattcaggatatcgaaaaggaaattggtgtatgggatgcgtcaaccgatcctaaacatcgtaccattcgaaaagatattattttcctgaaaggtgaactgggtgcatatcctggcttcaacgaaaatggtgatgtcgatccgtcctctactggctccggcgtgaaatacaaggtaatggctaacgctcaggcggtatctatccatgaagcacgtattactaagctggaagatgactgggtaaactcagatgtaggccatttaaccgacgaagttaccgatctgcgtaacgaaatggggccgaagcatttagccactttcgaatctgtgtatgttcgtctgaatggtatcggtggcgatatcactggtattaataccgaactgtcaaacatcaacacttatatcgggcgtacaggctcaggtggttctggtagtatagattcccgcatggaaactgcggaaacgaacattactactctgcaaacccagatgaatgatccggttgttggtgttctgcctcgcgtaatccttctggaaagcgctgttggtaactcacaggttccaggtagtatccgttacgatatcagcacaatgaaacgtagcattagcgatctgaatatgatcgttggtgaaacaagtgatgatggtctgcgcggtgaaatggcacaggttatgaccgatatcggtactgactctcagccaacgagcatgaaaggccgtattctgaacctggaaaacacacagcgcgacgatcaccaggcactgattgatgttaccgcaattgtgggtaatacgtcaactggactcgttgcggctaatatcgcgatgggtaaagctgtttatggtgacgcaaccagttctgatccattcctcaaagatggtattcagaaaacggctcgcgataacaaaactgcgatcggcgttaatactacaggatcagaaacagggatttataaactgatttccgatctgactgcgcgtgttgctgctctcgaagctggcggtggtggtaacgttgaacaacgtctggacgatctggaacagaataaagcctctcacaaggatgttactgatgctctggttccgtatatcacagaagttgaagcggataacaaatacgaagcgaagaaagttccactgtcatttactcaaaatctggtcggtcgtaacgattatatcgagggtgatgatatttctttatctgttaccgttacaggtggtaaactgccttatgtgtaccagtggaagaaaggaaccgcaaatatcgggactgattcaccgagtgtaatgatccagaacatcacaacgagtgattccggcgtatataaagttgtcgtaaccgacgctgaaaataccgtgattacttctgatgaacttgacattacggtatacacggttcctcagttcgatacaaacttgagcgatatttctgttgctgatggtgaaccattgactctggaagtagtgtttagtggtggtaaacctccatacacttacgtatggtataaagacggttctgtactgactggcgaaactggttcttctatcgttaaatctgctacaaccagcgaagatgcgggtgtttaccatgtaaccgtaactgacgcgatgaatagcacaagcgattcagcaacagcgactgtcacggtagcataattttaacaaggggcgcaagccccttttgaggatcatatgattacgaacaatccagaacagttaaaggatgaaattcttcgtcgtctgggcgcaccaatcatcaaaatcgaaatcacacaagatcagatttatgactgcattcaacgcgctttagacctgtatgcagaatatcattataacggcacaaacaaaacgtatctgattttgacactgggcgatgataatccgcgcaacgtgttcgacttgagcaaagagcacatcttcgcgatcacgaaggtattgcgtacaaacatgggttcattgaccacaatggacggtacagcggtttatccgtggtttaccgatttcctgatggggctgactggtggctctctgggtgggcgctgtgcatcgagtgtgtacggtatgaacgcatacggcgcggatatgggctactttacccagatgatgtcctatcaacgctcaatgcaagacctgctggctccactgcctgattactggttcaacgatgatactggtcagttctgcgcatgggggcaggtgaacaaaggtgacattatcgttattgaagcgatggttcgttccttcgttgatgtccctagctccgtaggaagcgtcgcaggatacgctacagcgggttctaacgcagtggaagaccaatccatagccgacatctacgaaaacccgtataacagcgttgtgggcggtgtacgagcgggacagggttcaactgttacgggcggaacgtctgcatataacaaccgatgggtaaaagactactctaccgcactggtgaaagagatcaacggacaaattctggctaaattccaggggatgcaattgcctggcggtgttgctcctgatggtacgcgactgatccaggaagcggaaaccaaactgcaaagtctgcgcgatgaactgatttcgatgtctgacgcagtaccgatcattatggtgtagggggaataatgcaaaactgggatgaaagtttattcgctcagttgtctacgggggaaggggttgatcgcaacttaaaggatcaggtcactaacccgtatgtaaactggtacaaatacaacccgacacaacagctacacgattcactgacagcagaatcaatccagatgaaatcgcctgatatgtattacgtccggcgcgacttcgtgaatattgataagatcctgggcgaagaccgagaatccaaatttacgaagtcatggaaaattgctgcatatattgaatcgtatgccaactatgaaggacaacgagatttctttagtaaatttggtctgagttcaaacgatgaaatgacgctggtaattaaccctcgtttgttcgcacatcaaactgatggtggtattcctgttctgggggatctggtttatttccctatggacaatagcctgtttgaaattacgtgggtagaagccgatccgttctatcagttcggtgatcgtcctcaacgcaaaatcaaccttgcgaaattcatctacacaggtgaagaactggctcctgaattgcagcgaaatgaaggaatccacattgaacctgatgcagaactggatctcgaaccgattcgaaatcttgacgggctggctgatattaacattgaacagtacgaagaagacaaagaatttgaaagagaaggtgatgaattcatcgaatcttttgatgttgtcaacggacgcggttcaccgtttgcaagtctgccataaatacgttatatgggtataggcggaagtctatacccacaacccatacaggaaaataaaaatgtttggctactggtataatagttctctgcgtaattatatcgtcctgatgggggcgctttttaatcacgttcaggttaaaagagtacgcggcgatcaagaaaaatacataaaggttccgatcacctatgcatcgaaagagaagtttctcgcttccatgaacaaactcaactacacgttgagtcaggaaaacgttgcaaagaccgaaaccattttaccgcgcatgaacttatcactggtggatctgcaatataacgcaatccgtaaaaccagtatcgcggtcaaccaaaaaatgacacagttagcaaccccacgaaaaacgatcacacagtttaaccctgtgccgtatcgtcttattttcgaactgggtgtgtatacgcgatatgaagatgatatgttccagatcgcagaacagattttgccatattttcaaccgcatttcaactgtaagattaccgaactgcataagaacgatatcacagttgaccgagacatcaaaatcagtctccaatcggttgcgccggataccacattcgagggcgatgcaaatcaacgccgtcatgttgagtggtcatttatgtttgaattacagggttatctgtacccgcctgtaactgatgttaaaggcgaaatcagaaccgtttacacggatttcttcgctaacatgaacccgttagataaagataactttgaatccgtggatagtcaagccgatccggtagatctgcctatgcaggactacacgggcgaagaatatattcagacgtactcgcacgataagccgatcccgtctggtgatgaacctcctaagccgagggaatgagaatggatgaaaaattagatttgcagcaattgctgaatattgattccctccctggcggcgttgagtctggggaggatgtggttgtttacgaaaaacttgaactggttgacgttcaatcacatccagcagaccggaaaccggatctggaagaggattatacgctcgcgcgtaagactgcgcaccatatgaatcagatgatcatggatatggcgcagatcgcattacacaacgcgaagaactccgaatcgcctcgccacgtcgaggtattcacaagcctgatgaatcagttaaacgtttcaaacattggcctgatgaagattcacaaagaaatgcgtgagattacggaagagactacaaaaccaggtgctgaaaagggcggtggtggtagtgaaatgaatatcgagaatgcaaccgtatttgttggttcccctacggaactgatgcagaaatacggcagtgcatatgaacccaaagagggcttcattaatggtgaagctgtagaggtaaaccctgatggaaatggaaccgacgatcgatccgagtaaggaatcagatcaccctatcggattaatgcatcccaaatatctgaaaaagaaaattgatgaattggggatggagtggacacaaagcgaacacgataaaaaatggtatccgacaacgttcagtgactacctgaaaattaacggcattcaaaaggtcgatattcagtctaaggacagttcgaactttgccacgtacaaaaataaaggcaacaagaaaacccgatataacggcaacccaaacctgaaacgtgcgtatatccagactaaatggacgcaacaaatgttgatggagtgggtgaaatgtcgtgatgatatcgtttattttgctgaaacatattgtgcgatcacccacattgactatggtacaatcaaggttcagttgcgtgactatcagcgcgaaatgctgatcgaaatgcacaaaaaccgtatggttgcctgtaacctgtcgcgtcagttgggtaaaacaaccgttgttgcaatcttcctggctcacttcgtgtgtttcaacgaagataaatatgttggtgtgctggctcacaaagcctcgatgtctgcggaagttctggatcgtaccaaacaggcgatcgaactactgcccgacttcttgcagcctggtattgttgaatggaacaaaggttctattgaacttgacaacaaatgtaaaattggtgcgtttgcatcttctcccgatgcggtgcgtggtaactccttcgcgatgatctacatcgacgaatgcgcgtttatcccgaactttgttgatgcgtggttagcgattcaaccagtaatctcttctggtcgtaaatcgaaaatccttatcacaacgacacctaacgggcttaaccacttctatgatatctggaacgctgctatagaaggaaaatccggtttcgtgccttacacggcgatctggacatcggttaaagagcgattgtatacagacggcgacaacggtacatttgatgacggttattcgtggtctgcgaagatgatcgctggctccagcaaagaggcattcttgcaggaacactgcgcggaattcatgggaaccagtggaaccctgatcgctggttggaagttgtcaaaactcacatggattgatattgatgaaacggaaacgaacttctatcagtataaacgtccagtagaggggcataaatatgttgcggtacttgatccagcggaaggtcgcggacaggattaccatgcaatgcatatcatcgacattacgacgatgccatttgaacaggttgcggtgtatcactcaaacaaaacgtcgcatcttattttgccggatatcctgttacgttatctgaatatgtataacgaggcatggatttacattgagctaaatagcacagggcattcagttgccaaatctctgttttccgaactggaatatgagaatgttatttgtgacagctacaacgatctgggtatgaaacagactaagcgatcaaaagctatgggatgttcgacgctgaaagacctgatcgagaaagataaattgatcataaataacaaaaagacaatactcgaatttcgtactttctcagaaaaaggcgtttcgtgggctgcggaagaaggatatcacgatgacctcgttatgtcgcttgcttgtttcggttggcttacaactcaaatgaaatttgccgaattctgcgagaaagacgatttaagactagccaatgaagtttttgcacgggaacgcgaacagctatacgaagacgcattatgtccggttatcgttacaagcggtgatgaaacgatttcggttggttctcacggtatttcgtttatataaattagaggaaattctataatggctttacaatctccaggtattgaaaccaaagaaacatcggtacaatctaccgttgttcgaaattcaactggtcgcgctgccattgtcggtaaattttcatgggggccagcttatcagatccgtcagatttctaacgaagtcgaaatggtaaactattttggttccccagacaacttgaccgctgactatttcatgagtgctgttaacttcttgcagtacggtaatgatctccgtgtggttcgcgttgtcgataaagatgccgctaaaaacgcaagcgcaattttcaaccagatcaaaacaactatcgcatcacagggttctaactacactgtaaacgatgtgattaaagtaaaatacaacaacgttgttgtagaagaaaacggtaaagtgtccaaagttgacagtaacggcaagatcctcgcggtaatcatcccaagcgaaaaaatcgttgcccgtgctaaacagattggtacttacccagatatttctactggctggactaccgaaattgtttctcagtcttccggtgtttccgcgtctattacgattgacggcatcgaaagcgattcagggatcactctgttgaacctggatattgcaaaagaaacaattcagggaaccgcattccagactcttacccagaaatatcagatcccgtctgtcgtggctctgtatcctggtgaactgggttcaactgttcaggtggagattatctccaaagctgcttacgattctggcgctatgatttcaggctacccttctggggtttccgttaagaatagcggtcgttctgtaatgacctacgggccacagaccgacaaccagtacgcttttgttgtgcgtcgtggtggcattgtacaggaatccttcatcgtgtcaactgagaagaccgataaagatatctacggcgtaaacatcttcatggatgactttttcgctaacggtggctctcagtacgtttacggtacttccctgaactggcctaaaggcttctccggtatccttgagttcggcggtggtttgtcctcaaacgacactgtaggcgctgatgaactgatgactggttgggatatgttcgctgatcgtgaagcgctgcatgtacctctgctgattgctggtgcgtgtgctggtgaaactgtagagatcatgtctaccgtccagaaacacgttatctctatcggtgatgaacgtcaggattgtactgtgtttgtgtcgcctccgcgctcacttctggtgaatatcccgctggcaactgcggttgataacatgattgaatggcgtactggctataaactcagtggtggtgctgttgttgataacaacctgaacgtaagttcaagctatggcttcatggatggtaactataaatatcagtatgataaatacaatgacgtgaaccgttgggttccgctggcaggtgatatcgctggcctgtgtgtttacactgatagcgttgctcaaccgtggatgtctccagcaggttacaaccgtggtcagatccgcaactgtatcaaactggctatcgaaccgcgcacagcacatcgtgacgcaatgtatcaggttcagattaacccggtaactggtttcgcgggtggttccggcttcgttctgttcggtgataaaacactgactaacgtaccgagtccatttgaccgtatcaacgttcgtcgcttgttcaacatgatcaagaaagacatcggtgataacgcgaaatacaaactgtttgaaaacaacgacgatttcacccgttcttcgttccgtatggatacaggtcagtacatgactaatattcgtgcgctgggtggttgctacgattaccgtgtaatctgtgacaccacgaacaacacgccggacgtaatcgaccgtaacgagtttgtagcaacgatctacgtgaaaccgcctcgttctatcaactacatcactctgaacttcgtagcaacgtctacgggcgcagatttcgatgaactggtaggaccgcaagccgtataacgtcaagggggctgaaaagcccccataaataatccgaggttaaaaaatgcttactgacattttacgcgcctttgaatccggtgatttcgcacgtccgaacctgttcgaagtagagatcccgtatctgggcaaaaactttaaattcacgtgtaaagcggcaaccatgccagcggctacagttgaaaaagttccggtaggataccaaaaccgcaaaatcaacgttgctggtgaccgtacctatgatgactggacaatcacgatctataacgatgacgcgcataatacgcgtgacgctctggtagcatggtcaaacatgatgcacggaatgggcgatcagattagtggtgatattccagcgaactacaaaaaaaccgctacggtgaaacagaaaaaccgtaacgatgaaattaccgccgaacataccatccacggtcttttccctactaacgtaggcgaagttaccctggactgggacagcaacaacgaagtgtcaacatttgaggttactttcgcgctggactggtgggaataaaggctataaatacaggggtagcaatacccctatcattatttttcggagttactatgaactttttgggctttggcaatgtacttagctttttcaagaacttcgcccgtgaggacgaattggatcttgaacagcaattaaaaaatgatacaggttcggtcgcgcctcctaaaaataatgatggtgcttatgaaatcgaaactgatctgactaatcagaaatacgcaagcgtattccagcagttttattctggacaagatccggcgattcagaacaaagaacaattaatcaatacatatcgcggcatcatgtcttacccagaagtagaaaacgctgtttctgaaattattgacgatgcgatcgtgaatgaacagggcaaagatatcattactttggatcttgccaaaacagattttagtaaggcgatccaggacaaaatcgtagaagaatttgataacgttctaaatatctatgattttgataacatgggtgcgcgtctgttccgtgattggtatgtggattcccgtatctacttccataaaatcatgcataaagacgaaagcaaaggtatccgcgaactgcgtcaacttgatccgcgttcgatggaactgatccgcgaatctatcactgaaacccttgatggtggcgtgaaagtattccgaggttatcgcgaatttttcgtgtatagcgctcctaaaaatggctatacatacaacgggcagatctaccagcataaccagaaggttaaaatcccgcgctccgctatcgtgtatgcgcattctggtctggaagattgcagtaacaacattatcggatatctgcaccgcgcagtcaagccagcaaaccaattgcgtttactggaagatgcgatggtcatctaccgtatcacccgcgcacctgaacgccgtgtgttctacatcgatgtaggtcagatgggtggcaacaaagcgacacagtacgtaaataacatcgcacaggggcttaaaaaccgcgttgtgtacgatgctaaaacgggtactgttaagaaccagcaaaacaacctgtcaatgacagaagattactggttaatgcgtcgtgacggtaaagctatcaccgaagtagacacgcttccaggcggtgcgaacttctctgatatggatgatatcaaatggtttaaccgtaagctctatgaagcactgcgtgtgccattaagccgtatgcctcgcgatgatgggggtatgcaaattggtggtggtggcgaaatcacccgtgatgaactgaaattcagtaagtttatccgcacactgcaaattcagttcagccctgtgctttccgatccgttaaaaactaacctgatcgcgaaaaaaatcatcacagaggaagaatgggaagaaaacgttagcaaaatttccttcattttccagcaagattcatattacgcggaagtgaaagatattgagattatggaacgtcgcctaacgttgatgtcacaggttgaaggtgtagttgggaaatatgtctcccataaatacatcatgaaagagattcttcgaatgtctgatgaagacattgacgaacaagcgaagctgatcgaagaagaatccaaagaagaacggttcaaaaatcccgaagaggaagaggaaaacttttgatgaaagaatttatcgaagcaatcaaaagcggtgatctggtggaagcgaagaagcaattctattccatcatggaagaccgtaccgaagcccttcgccaagaaatgcgcgttgaactcgcggaagctgtacgcatcgaaggtgaaaccgacgatgacgacagcgatgacgatgacgacgacaaaggcggcgatgataaaggcgacgacaaagacaaaaagccgtctgataaaaaagacgacgataaagacgaataagaggtgtaaataatgcaactcgaactcgaagaaatcagcgtcgaagatctcgaaccccatttaaccgaagcgaaagcccgtgttgatgttctggggatcgatgacggcactgtgaagatcatcgaaaatttggcggtcaatgaacctcatttagccctggctatgatgtccattgtcgagggtttgagtttagatgaagtcattgttaaacacgtagattcgcgcggtaatgtggaacgtaaaaaagaccgtaaaacccgtgaacgtaatgcgtatcaaacaactggtttaactaaatctcaacgtcgccaaattgcgcgtcgtgcgctaaaaacaaaacgtgcaaacccttctattacaacccgcgcacagcgtaagcgtaaaaaagcgctccgtaaacgcgccgcattagggctataaatatgaatgaatcccaactcaatgaaaacggcgatatgctgctaatcgaggaatggggtttaccttgtgcggatatttccgattcgattttagaatcggtcggtgagtcgaaaaaagacggtaaacttcggattgaaggtattttcctccaggccgaaaaagttaaccgcaataagcgactgtatccgaaaaaagtattagaagaagcagtaaacgattatatcagaactcaggttaatacccgtcaagctctgggtgaaatgaatcacccgccgcgaccgaatgtcgatccgcgtaatgcttgcatcctaattgaaaaattatggtggaaaggtaatgacgtttggggtcgcgctgttgttgtcgaaggtgataacggtgatggggataaactcgcggcgttaattcgcgcaggttgggttccaggtgtttcttctcgcggactgggtaaactttccgattctggaaaaggttacggtatcgtacaagaagggtttaaattggcggtaggcgttgatgttgtttgggggccaagcgctccagatgcttacgttaagccgattaccgaatctcagtcaagcaaaacgcttgttgagaataatagtgctgatgatgacgctttcagaaaactctctgaacgtttgaaaagtctatataaataatatcatatcaaacaggaaacttagaaatgcttaaagaacaactgttggcagaagcccagaacctggataccccagttgagttagacagcattttcgaatcagttgaactttctgatgatgcgaaagcaaacttcaccactgtattcgaacaagctgtaaaagcaggtgctgcgaaactcgctgaaacccacatcgcccagatcgcggaacgctccgatgaactggttgaagcccaggttgccgaaaaagctggcgaaatcgaaaataaactgtacgaagatgcgaataaatacttcgaccacatcgcgcaggaatggctctctgaaaacaaagaagctgtgtcccgtgatatcaaggccgatctgttcgaatctctggtaatgggaatgaaagaactgttcgttgaacacaacgtagttatcccagaagcgcaggttgatgttgttgcagaactcgaagatgaactgaccgagaatcagcaggaagttaaacgcctgttcgaagctaatcaggctcaggctaaagagatcgccaacatgaaacgcgataccatcgtttcagaaaaaacaaaagatctgactgaatcgcaaattgaaaaggttcagaacctgatcgaaggtttggaatattccgacaagttcgaatccaaactgaccgcaatcgttgaaatggtagcgactaaagcggaaaaacaggttgaagagagtaccactactcagacaaccactaaagatgactttgttccggtgaatgaaaatacacctccagcagagaaatcgaagatcaataaatatgtacaagcggctaaagccctttcctaatcttataaggtaagaaacaatgtctaagaaaaacgaattgatggaaaaatggaacgatcttctggaatctcaggaaggtttaccggatatcgctaccaaatccaaaaaacaactggttgcagcaattctggaaactcaggaaaaggatgctgatactgatccagtatatcgcgacgaaaaaatcattgaatccttcggcggtttcctggcggaagcagagatcgcgggtgaccacggttacgacgcaaccaacattgcctctggtaaatccagcggtgcaatcaccaacatcggccctgctgtaatcggtatggttcgccgtgcgattcctaacctgatcgcattcgacatttgcggtgttcagcctatgactggccctactggtcaggtgttcgcactccgtgctgtatacggtaaagatcctctggctggcggtactcctgcaaacgttcgtgaagcattccatccgatgttcgctccagacaccatgtattctggtgaaggtgcaaacaccgcgtttgctgctatcgcaactggtgttgctatcgcttccggcgctatcgttaagcacgtattccaggaaactggtatcgcgtacttccagaacgtgacctccggcaacgtaaccgtaactggtgctgatgctgctgctctggatgctgctgtaatcgcagaaaacgagaaaggcactctggctgaaatttccgaaggtatggctaccagcgtagcagaactccaggaaaacttcaacggttccagcgctaacccgtggaacgaaatggctttccgtatcgacaaacaggttatcgaagctcgtagccgtcaactgaaagcacagtattccgttgaactggcacaggatcttcgtgctgtacacggtatggacgctgacgccgaactgtctgcaatcctggcaactgaaatcatgctggaaatcaaccgcgaaatcgttgacctgatcaactacaccgcgcagattggtaaaactggtttcacccagaccgtaggctctaaagctggtgcgtttgacttccaagatccagtagatattcgcggcgctcgttgggctggtgaaagctataaagctctgctgattcagatcgacaaagaagcgaacgaaatcgcgcgtcaaactggtcgtggtgctggtaacttcatcatcgcttcccgtaacgtggtttccgctctggctcgtatcgacagcggcatcactccggcaggtcagggtctccagaaaactctgaacgtagacaccactaaagcggtattcgctggtgtactgggtggcacttacaaagtgtacatcgaccagtacgctcgccaggattacttcaccgtgggctacaagggtgataacgaaatggatgctggtatctactacgctccatacgttgcgctgactccgctgcgtggttctgatcctaagaacttccagccagtaatgggcttcaaaactcgttacggtatcggtatcaacccgtttgcgaactctcgctctcaggctccggcagatcgtatcacctctggtatgatcagcaaagaaatgtgcggtaaaaacgcatacttccgccgcgtgtgggttaagggactttgatcctaagttgttgaaaaacaacgactttttaaagggaaccttcgggttccctttttgtttatataaatagtgaaaacatttgaggctatattatgaaacatatcatttataaaataacaaacaccatcaataacaaaatatatgttggtgctcactcaaccgaagatatcaacgattcatacatgggttccggtattgcaatcaaaaaagcgcaaaagaaatatggtatggaacatttcacaaaagaaatacttcatgtatttgacacccgtgaagaaatgtatgagaaggaaagggaaatagttgatattgaattcataaatcgaccagatacatataatgctggtattggtggtaaaggtgctccaatggcattgattggatggagtgatgaacaacgcaagctgatttctgaaaatacttcgaaagctatgcaagctccagaaatgcgcgaacgcctttcaaaaatcaaaacaggaaagaagcaatcggaagaatccaacaggaagcgttcagagactatcaaagctatgtataagggttctgcattcgacagaaccggatctaagctcacagacgcgcacaaggccaaaataagccgttctgtgtcgatagatggagttgtttatgcaagtggttctgatgctgctaaagcgttggggctttctcgatctggccttgattaccgtttaaagagtgacaaatttcctgaatggaaattcgttgcataaataaacaatatactccctataaattcaggaaccaaagaaatgagtgataaacactacacaattcacaagttgatgcgtcagtcttcgcttccgtctggtaaacgagaaaaagttatcaacgaagcaacaggcacgaccgacatcaacgtacagaacacgcgcccagaactggtttctttgactcgcgcggttaacaacctgatctatcatgaactggttgctgtacaagaaacagaactccctgttgcaacactgttcggtgttcgctatcgcaaccctaatggtgatatgactttctccagtgctgcaacctattcaggccgaatctctggacgtacagacatcgacgaaatcgatctgactaaagcctacgttaaaggtgatttgttcaagcatgacggcactgacgttgtttatgaggttatcgcaccgattaccctgaacactctggatactgacaaagacaccgcgatcatgaaagctgtgttccaaagcaaaattcgtctggtgagtgaagccgctgacacttctaagtatgaaaccagcgaagatatcgcgtcaacctccttccagatggatcgctggaatattccggtacgctcgcgtaagtttaaaaccgaaatgacggttgaactgatgcaggatttggaagcgaaccagttcgaagctgatggggtgatcgaagacatcctgggaaccgtggcaagtgaagaagtcaacaaagacattattcaaacactgatcaccgtttccaaacgttacaacgtcgatggactcgttacggatggtatttttgacggtactaccgcatacaccgcgaaggatgctccagcattgggtcgtatcctgtatcaattagcgtgtgaaatggggcaggaaatgaatagaacgacttcatttgatgctacctacgtcctcgcaacagcgcgtgttgtaggcattctggctgcgtctggttggatgcacgaaaccgacgaacaacacccactggcaacaggtaagctgaacaacggttattatgtctatacagacaccaacagcccgttcgattatatgctgactggttgcaaatatgatctgggtgatatggatcacgtaggctctctgttcttcgctccgtataccgaagctgatgaagcaggttcaatcaaagtatccgtagatccggcatccctgcaaccgaaagttgctattctgatgcgttacggtctttccgtgaacccatacacagcagaaagcgaatccgatcacctgatcaaaggtgatgattggtctgctcttgcaggtaaatctaagctgagtcagatcgtaggtattaagttacctaaactgggttaacaagttttgttttgagaagaccattatagtaataaagatctataaggtcaaacgagcgaagcgagttttcacgaacgaagtgagtgatgggtaagtacgatgtactgtttataatatttatattttatatatagagaaaacagtacatttccgtatactttttaaccaacattcactcactacgttcgttcatgtactcgcttcgctcgtagatttgacttcttgatctaactggttataatgttactttgttttgaggtgatacatggctgaactaaaacttgaagatctacaggctgaacttgaagaggatatgcgtattgatccgttgaagttacaaagcgaatcagcagacattccgaagatttggtcaaaatggcttcgataccattcgaatgctaagaaaaaacttattcaactccaggcgaagaaagaagcgattgtaaaagatcggttactgttctacactggtagacacgaaagcgaaatgaccgatgtcatttacactggttcgggtgaaatcaaaattgctatctccggtgatcctaagaccgttgaagttaacaagctgatccaatacttcgaactgattgcagagtttaccggaaaagcgctggatatcgttaagaacaaaggctactccatcaaaaacatgttggagatccgtaaacttgagagtggtgcataaaatggcagaagaatttgattgcaaatgcgttgtgtgcaaacaaccgatgaactcccgtaatacggcgtttgtcaatgaagctggcccgatctgcggtgtcgtatgtttgcaatatctcaacgaaaggaatgatcgcggtatcaatgaagccgacgatctgaacgaagttcaaatgttgctgtaggtgtgaatatgaaagactattcaaaaatcgactttaacgaagtatttcgtttgctgggattgatggaagaatgtgtgaccagggttcatgcacttcgaatttcgtttgaaagcggttgtatcgaagacgaacgcccagatttatagcagtaaatagatgtgtaccccttgtggggcttgggcttaccgtgtggcgtacccatttgcgccgtccgatagaatttactttcggtggggtgattggtaagataccttcgagtaaaggccagttaattgtaattcagaatagtacagcactgaaataaaataaatgtacgtgtcggaacaaacggtttccgaaattaaaaagccccttcctttcggttggggctttctttttaaaacttctcttcttctccggtttcaagttcggctttcagttcttctcgccgtcccttgatcgcgtcacgcattgaaatgtcatcggatgctgcaacctcgacttctttcacgcgggtgttgtaatacttttcaagttctttcaaaccttctagtgtccggcacgaagcaaccttattcatgaaatcatcaatcgctgcttcgtttacgaatgtagtaaaacttttcattttggcctcttaaatttctacctgtttgatcgcgtagtcgaatcgttcttcattgtagatccgcacacgttccatagcatgtttcataccgtagtttgtcgcactgtatttatttttggctgtcttagactttgacagcgtagccaggttatcaacgatatcccatacagtagcgagcgctttcgatccgtgcttacgaagtacacgaccgatagactgtttcaccacaacagcagatttgcaagggtgcgcaaaaatgatgtggtgtaggttcttgattgagatacccgtactcagtaccccgatcgaaccgatgacgattaaacctttcgtcgattccgcgattttcttcatttcgttacgatcgtcaatgtctgtatcaccattgaccaacaccacgttatcgtaaaccttgctcaactgctcgtacagccattttccgtgctctttgtaccggaacatcacaaaggcgttttcgttcttctcacgggctaatttgagcgctaattttagaatccacgcgttgcgccgtgtgtggctggttacgtacttgatttccgtctggtagtccgcacccttcaattttttgacctcttcttctttgtatcgaaggaagatcgtgttaattttcaggttggtgacttgtccatcatccatcaaacgacgcgtatcaactggtttaaagactttgccgaacgcaccgatgtattgcatcatgttcgttttcccttctttcagggaaccggataaacccagtttgaagatacattgatccatcgtgtcgataatctttttgatgctcatgcctgttgagaggtggcattcatcaaccatcaaacacatgaactgttggaaccattcggcaggcattttaaccgctgattgccaggtagaaacgtaaatcagtgcattactgtttttcgctgtaccggaacggatacccagcattgccgatttcgggaacaaacgatagtttgcgatgtcctcgatcatttggtcaacaagtgcggtagtcggaacgatgatcaacactttcccgctgtaatgttccagacaccaacgagagataagcccctgaatcagagatttacctgctgatgttggcaggttcagaacaccgcgacggtttttgataccgtggaacactgattcgcgttgataccagtacgggtcgatctgtttgtcgccgtcataaaccggatgttcgctaacccacttatcaaaatcttcttgcgtgatatcctctgtttcgtggatctttggatcaacccagattgaatacccgcgtgattctgcgaatttggataccagataggctaacccatacgggagtttcccgttgtagtccatcaagtaaatgtaaccgttccatccaccatatttgtatttggcctgatactgatagcctgggggctggaagctgaaatagtcacgcagttcatagacaatgtttggttctgcctgaatctgtacgtggcttgtgtttaaaaatttgacttcaatatccactatgattaccctatgtacaaagtatatacgtatttatgtcataaatattggataaacacttggagataccaatgaacattgattacgaaaaagttgatgggttccgtaccctcgacgcaaaagaacagaaaggcgcgttagctgattacgcaatgactgtgtttgctgttaagctgaacaaacaaaaatccttcgataacatgctggcggatctggttgctgctttaccggaagatgaagaaaaaccggaactgctgatcgattcccctgaaccggaaatcgttgcatataaaggtgaggtgactatgggtgaacctgtcatcgaagccccgaacgttcccgatgtggttattgatgcttctgcggattttatggagtacgttaaagaggtcgcgccggaagtagccgatcaaatccaattagtacctgatgtcgtagaagctcctgtaagcgcttctgacgagtccaaaggcgaactggtatggttggaagggtttagcccgacaatcttcatgatggggcgctctgcgagttctaacgggtattatacctgtccgtggtggatctatgactggattaaacaaaccccagactggtacaaagatcctgatagctgtccacatgcaagcgcaatcgacacaatcaaatcacttgcgttctatatcgtgcgcgatggtgaagttcgtgttcgcgaaaccagaaatagccgattcgaaacatttaagttttagcactttttgctaaaaaacttgttgacgcataccctcgtttaaagtatatttgtactcgaaggcgggggaatggctctcgcagtgaagaaggaaagcaaaatgaaaaacgaaatgatgaaaaacgcttattacccagttctgtttgtttgggctgatggtaaagtgaagaaagtagtcaattcaaatgctccttactatactgttgaagaagcactgcgccacgcttacgaagctgattatcctgtccctgctgaacctggttatgctcgttggaacggttcaaaatgggttgctgatacctgggacaactacgaagaagcaaaaatggaatgcgatcctgattatgtttctcgccaaatggaagcgcacatgattgcagaccgtcgcctggataacgaagctcgcggtttctattaaaattcaaagggggcgtagcccccttttttgtaggtaaaatatgactgaattaaatcacgaatgcctgaaagacttatcagaaggtaaagagatcggaaacgtcatcttccttgatatcgacggcgttctaaataatatgcggtgcatgaaatttggtgagcatatggacattgaatgtgctcgacacctgcgccggatcgtaaatcatgcgaactgtgatattgtcatttcctctacatggaggatcggcaacacaacccatactctacgggaaatcttctacccgtggggattgtatcgcatcattgggaaaacctgtacgaatctaacagaccgacaagcaggacgcggtgatgaaatcaaagcatggatcgacaccttcggatgtaagaattaccttatccttgatgacgataccgatatgctgccggaacagagtgaacatttcatcaataccgatgggttcgtagggctgacagaagaacaatccacttacgcgatccgtaatgtgttcggtgtaacaaacccgttctgtcctgaatgcaacggctatgggcgcgtgaaccaatatgataaatgtccgtcttgtgacggcaaaattttacttctctaaatagagaaaaactaagaggttttgaaaatggctacagaaaaatggactacggtacacccgatcccgtggcgtaacaccagctttacctatctgccgtggtggatctttgatatcatcgtggctgcgaatgctgcaagcgaagactggcgtgattatgccgaagaaaaatacgcgaaagaattcgacacactgaaacaggcgtatattgattacaccgatgttgatttcatcgaatcccgtaacggttatctgtataagctgagtgattttactcctgctgatcctgtcgtaacaattacaccaaaaaccgctcctgctgatttcaaagtaggtgatgcggatctggctgcaactgatctgtttaccatcgatccttctggtacagaaatgactctgagtgttgactcttccggtcatggttctatcgttggtggtaaacttcatgcggttagtgaaggtgatgttgtcgtaacagcaacctctggatctgttactgcaactctgacggtaaacgttaaacctgcaccataataacaactaagaaggtaaaaatgctactatttgaattcaatgatgtattcgcaaaattcagcgacgcaatcgaagccaaatttggcaaacgcccacaaaacatgacagatgcagaatatgaagctgctgtatcgtccctggttcgtacagatttctatgaaaaactggcgatcgaggtgttgggttgggatatgatgaaatggggcatgacctatcgcgatcgcgaagtcggttttattctcgtcaacgaagcaaaaagcccgtcctgggtgaatagtcaaaaaatcgcgtacatggataaagtatgcgcacagatgggtattgtacgtttagacttctggacttgtcgggatctgaacgaactgaaagcccacgcttaccgttgccctctgatctcccgcaatgataagcatcgtcaagcatgggatagcgcagggaaatatcgtagtgttttcctgaacgacgatatgaacatcactattcaggatgttaaccgctcctttgcggattacacaccataaacaaaaaagggaaccgcaatggttccctttcttttatgcaatttttctgatttctttcaatgcttcttctttgctaccaacgaagagaatcgctttacctccggcttttctgaatggcaacacagcttttgccctgtcatcaatcagtatacctttgtccgcatatgctgctttctctccgctgcttttggtgtagtggaattcaggcagataaccgaacaccttcatcaacgcttttcttttttgttctgctaccgcatcggaattgtatttccctacgctggttaagatcgcaacctgacctaaagttctcaaatgacagaacaggtcgatgccctcttgtaatggttccagattttcgtagaagtcagtttgtgatatagcctgtttcgcttttttcaattcttcttccggcattctcgccgggtcaccgtacatcggaacaaaagaaccttcccagttgaacagtacaccatccatatcgaacaaaaactttttcatatcaattcctcggtttgtgtgtgcatcatattcatatatgttcctattgtcaaccccatgtatcagttttcggtgcgtatgctgcaactttcgccactaactctttatcaagctgatcaatggatttctgcggctttccttttgccttaactttgatgtagttagacttaacgacaaacataccgcctttgtcagatttcttgatttcgctgtcaatgcctactttgttgaagctgatccagatatcgccgtccatgtactgtttcagagagtcgcccatattcaggatcttcgccatagtgagcgctgccccttcgtgggtatccatgaggatttctttaggcactacacgatcgcgtttaaggttctgctgcatagcaatatgaacatcgttcataacccaaacgatatggatattttctttctgataacccagcgtttcaacatcacgggcgatacttgccagcttgctcatgctttttagggttacgtcaaagatcagatttggtttacggtcttccggtgctgctgcgatacccgcgtacacacgcgcctggtttttgttggatacgttgaacacgtccgcgatcacatgatgcagtgttgctacgttgtctgggtttttcaggttcatggttttgacatcgtgaccagttttcgctttgatctctgctgccagtttggtactacccatgaccaattttttgagtgcgtcaacgtccagtgtgataccttcgatgcctaacagcttttcgagggtgaaccctttaccagaacccgcaccgccagccaggatgactacctgaccaaatttaggataagccttaccgccgaaggtgatcagcgcttcatcaaggctcgtaaagtctttgaatgatttcatcttagaactccaggtgtttatttaaaagtatttattgacacggtttatgagtgcgtttatagtgcaattgttcgacggataagccggaagaactttaaccataaggtaacaattatgaaaaatgaactgcatgaattcatcaacgccgctgttcttggcgaccagtcaaaatataaagcccgtcgcgataccctgattgacgatttctgtaatttcctggggttcaagcgctggcataccccgtctatgcgtccagattgtgatccaaaatgggattacttcaaatggagtgatcgcgatcgtggttacgtcgataacgtccgcgtaatgtctttcaaccacttatacgcaaattcaacaattgctgttgctaaacgcaacgattcgacttatccgaacgggtggagtgttgctaaagtcatagaaacacttcttcaactgcgtcgcgaatataaatcagcataccgtgtcaatcccaatcctatctataatgaatggcaaatcgtcgcgaaatacctgctgaacatcacctattctattttctgtcgcttcgggacaaaagagattggatttggctctcatgatataattgcagaagcacgtcaccgcatgatccatgcaatcctgaaaattcaaaactctggtgggcttgttcttgctgcgttctgtgatgaaattgtttactacggagaacaggtcgaagttgatgatgttcaccacgaaaaattcaaaagatttgtattcgggcaatataacagctattcatatggaaacgatattcgtgtgatgaggcacccgcgcattatgttggatatggaagggtgggaaccaggtcacggaattggtgatgccgaaagccaacgtgaacgccgtgttcgttcagttgctaaaactcgcgaattgatgacaggtagccttactgattacctgttcagaacaaaagaagacgttgaaaaagaatttgttgacttgtcgggcgaatagcgataagctgtaatctctgaaaacaaggagataaccatgaataccattcactgccgcaaagagttcgttgagttctatcacggatcatgtactgctgccggaatcgaaagcatgttgttgcctccttgtgattctgatattctgtctgaaaaaggcagaaagaaaaatctggatcgtgttttcttcactgctgatatcgggctggctcgtatctatgctggaagggctgcacgttcaataggtggtgatccggtactttatcgggttgtgtgtccggtagatgtggtatgcatgaacgatgacaaaggcgcaagcgtttatcatgctgcatgggctttctgtgaggaattatgaaagataaggtgttagcgtatctcgttttcttgctgggatatcgcgttgaagtgatgggtggttattcttctttgtatggggatttaaccgcgatctggatggttgcgttgggggttatgtttacctttatggcgatctgtattgcgaatgaggctgatcaaaatgcttgaattttatcctgctggttgcaagtcaaatccgcctgatgcatcgttccaatcgtggatttattttcacagggaactaaacgacatcatcgaaagtcagtggaaagaccatcctgaacgaagtgcccccgatttagtcgatagcgtaacagatgtacgcaccctggaaaaagggctgtatgattgtctggttcagggaatggtgtgtaaattgattttgtggtatgctccgatcggttcagatctaactcgcaaaatcgcccgtggctatatcatgacgaaacgtgagtttgaccagatctggaacgaacccgactgtttcgaacgcgaaaaatacgaaaatgaggttagttgtatatgaaactatttcatgttgtatatggtggaatgaaaaacatcgacatcgccgcgttatctgctgggatgctggacgaactcgaagcacagatcgggaaacgattcaaagccagtatcaccgaaacgcaaactttgtttgtcgatcaccctgcggatatggaaaaccttgtcaacactctggatgatctgatgatcccgtgtgctgatggttggaacgaagcatccggtgttcatgtagttgtaacttttgttcttaaaaatgttgacagcagaaatgccgaagtgttagagtttattcgtaaaattgattctactaaaggaaagtaactatgaaaatcgttcagcgtaatatcagcgaagttagccagcaggaaaaagtacagattcatttcaaattcaatgatctgaaactgggctatgcacagatcgcccgtgagcacatgctcgataacggcgacatttacgtgattgttcaagaaattgagcgaattcgtgctttccgcgcagaaaatccaaaagtgaaacatgttctgcgtcgtgtgtacatcaataaacatcgtgaagaacagcgcaagcctaaactcaaagctaaacgcgatccgcgtccagataacaaacgtaaagcaatcaacggcgctatggcgctggcgttccaggaagcgggtttggcgtaaggggtttatatgtcttcaatgatgaatcgctggtcgggcgtgataacttcgactatcaaaaaggatttggtgaaggttgaagcaaaaccaaagccagtagaaccggaaaaagttcaaactatggtatcactcgatcctgctgagttagaacaccgccgccgtgcaaagcaaattgaattcgatctgcgtgtcgctcgttcatacaacagtaaaaacgatgatgcgcgtaaccgcaaccttcaatttgctctgacgttaagcgactgggcgaagctaatgagtgaacccgtatgttcttactccggcagaccgtttagcaacaaaggcggttgctctgactcccgaacaatggaacgaatcaacgcttctctgggatacacggttgaaaacacgatcgcagtaaccagcgccgcgaatagcgagaaatcaaatctcgatgcgtttatgaagggttctgtgatccttccagaagtaaaactgaaactgttacgcaaagctgcgtatcaaattgaaaaacaactgaaaatcaagggttaattatgtttgtgaaatattcttctctgactaaccattatgaaggtaaattcatcaatggtgtgatcatgaatggtttgactggtggcgtgtgggttgcgcgtgaaaagatccacggggctaactttagcctgattacttcggacggtatcaaagtcattccggcaaaacgtagcggtgaaatcctccctgctgaacaattctacggttgtgaaccagtagttgcaaaatactctgaacctgttcgtaagatgtgggaaatgctctctgctgcccgtcagttaagtggcgtgtatagcgatgaactggtgattcaggtatacggcgaattcgcggggcgtggtgtccagaaagatgttgactacggcgaaaaagatttctacgtatttgatatccgtgttaatggcgaattcctccctgataacgttgttgcaaattacgctgttgctgttggcctgaaaatggctccactgctggcatacggtacgtttgacgagatccgcacactgcctatcacctttgattcggtggttaacctggcgaactccggtgcgatccctgcaaagaacggtgttgaacctgagttcaaaaacttcatgacgctgaaagatggtgaaggtgagaacatcgcagaaggtttcgtgatgaagcctgttcaacccgctttcatgccgaacggtgaacgcgttgcaatcaaatgcaaaacgacgaagttcacagagaagaagaacaagcaagcgaaccgcttcgatgctccttctgaactgtcagaaacagacaaagtgaagctgaacgaattcacctgctacctgactgaaaaccgcgtgaaaaacgttctgtccaaaattgacagcgcgaatctcaccgctaaagatttcggtcgcgtgatggggcttacggtacaggacgcgctagaagaaatcgaacgtaactacgggcctttcctggaacagttcgaaaatccaacgctggcgaagaaaaccttcactaacgaagcgtcaaatctggttcgtgagaactggggcgcaatcctgaacaatgaattttaaaactgttctcgaaaacgcaaaaacggctaccctgatcggtagccgtgaaccccctgaacgtatcgcgagcatagccataaagattggacgtgctttaagtgatcgggggatcttcgcttactctggtggtgctcctggaatggatagccatttcatgtttgactactcaccagaaagacggcgtataatcctccctgagaacggttttaacgggttgtattctaatggtaaggatatcatcgactatacagaatacgacacgtacaaagccgctgacgaagcgagaaaggtagctggacacttcgacaaccaaagcgaatggacacaacgccgatacgctcgcaattcaatgcaggtattaaccgaaaacctggacaaacctacagattttgttctattctgggcggtagagaaagatttttgtgttaaaggtggtactgcgatcgctgcaaggcttgccagattgtataaagttccaacgttcaacctttggaatcaaaacgttctggatgaagtctgcgatactttagggattaacactaaacctcctactctggattttctctggtgataactcccgaacaatcacgtaattacgaacgcctctctgttgaagaggcattaaaaaaggcgaaacataatggtagaaatcaatggaatcggtgtgaacgtacaggcgggaagcgggacatcgtgggtcaaacgcgaaacacaagatgatccccgctgtggacgtagcccgacactggcggaacgtgcgcgtaaactggttgatgaaatcaacgcgaaaatggtcgaagcatcccgtaaagacatttccgagtatgtcctgaaatatccgactaaacaagcatatacctttgatatgaaacgttttatcggtaaggttatggatcaggaatgtaccgaaaaagcatatgcggatctgggtgaatggctggcggaagaagggtttactttcgatacccagcgcaaccgacaagctgcgttactcaataccttcgcgggttcgcgtcgtattaccaactttagcgatcctaagcgtgacggatatagcgatctgacttattacatcacctggtgaaaataattcgaaaaacttgttgacgggagttatgagtgtggtaatatagctcccgtagacaagacactaacctaaaaggaaaacatcatggaaatcaaattagtacctacttgcgctggctactgcttggcactgaatggtgtagcacacaacggtaaaggcttacgggctaacgttgaagcaatgctgaacgaactgggtgcggtttatgaatatgatgacgttgcaaccagcgttaaaatcataagccttgaaaaagatggtgttaactgtgcgggtttggtgggattgctacatcgactatagcgacaaccgggtcttcttactgaccagcaaataaggatcgaacatgagtgaagcagaatatattgatagctggggtggctatgacgatgacgacgatgatttttgtggtcataatttacgtcgagaaactctaaggcttttgcaacaagcaaatgcgccgaagcaagtcaaaactcctgttaaatattccgatggttcgattcgaactgaaacggttgtcaaagaagtaaacgggcgtgtcattacgtccgagcggcagaaggacatcaaacaattgtacgatgttgcaaaagccgctaaagtaggaaccatgatcacttgtcctacgtgcaaacagttgcacaagaagacgacatatcataaggtgttctgctctaatggtaaaaaatccaggaaagactgcaaaagcaaatactggaacacgatccatccagaacgtttggatcgtatcttttaaatcaaaacgtggagtacgtttaaatgaaaacttttaatgaactgaatagcctgatcacctcaactgattcctacaaagtgtcccactggttgcagtatccacaaggcactgatgcggcgatgttctatattgaatctcgcggtggtaagtttgatgaagtagtaaccgctggcgttaacttcgttgcgcgggttcttgccgaaccaattaccatgaaacaagttgagttgacacgggtactttaccgtaagcactttgggaaagagattttcaactacgaagggtggaagaagatcgcagaactgggttatgtccctgttactttccgtgcgatcccagaaggtacggttgttccggttaaaaatgccgttgcgactgtgtacgccgaacgtgaattctcatggttggctgggtggctggagacaatgacgattcgcggtatctggtatccgtcatctgtagcaacgctatcgcgtgagtgtaaaaaggttctggctcattaccttgatatgacttctgacctgactggtgaagcatataacatcacactgggtacacgtctgcatgatttcggggcgcgtggcgcgacctctgctgaatctgcgggtattggtgggctggcacacctctataacttcatcgggactgataccgttgaaggtatgattatggcaatcagtctgtttgtggactatcaaactctgtttgatgaagttgaaaacgtcgaagcaatcggtgtttcaattccggctcgcgaacattcgactacgatttcctacggtaaagagaacgaagacgaagcatacaaaaacagcatcgaaatgttcggtacagggttctatgcttgtgtgtacgattcctgggactacaaaggcgctgtagatcgcatcgctgaatataaagagcaaatcattgctgcgggtggtactctggttgttcgtcctgattccggtgatatgattgataacatcatgtacaccctgcgtaaactgggcgaaatcttcggttacaccgtaaacagcaaaggttacaaagttctgcataattcagttcgaatcatccagggcgacgagatccacggacctgaaacaatcaaccgtgtgttaagttggatggaagcgaacaagtgggcgagtgagaacatcgcgttcggtatgggcggcggtttgctgcaagaagttacccgcgacactcaaaagtatgctgaaaaactgtgcgctatccgcgtgaatggtgtgtggaaaggcgtttacaaatgcccgaaaggttccgaatggaaacagagtaagaaaggtttgctgatgaccatcactaacggtgtggaattcaaaacaatcgacactctggaaactgagattcctgacgggtggcgtgatgcgatgattacgtattacgacaacggtgtattaaacacctccgatacagtaggggttatccgtgagcgagcaaggatttaatatccgcgccaacgataacggatcggtagtcttctacaacaatcagccccttgtcgctcgcaaggggcttttttgtaagttggtgggctacgggttcaagttggaacaggtggacaacgcgacactaaaagaggttgttcgaattgcttatctgctgaaagataaaaaagatgaacatcgtgctattgcaatgcttgagaaattaggcgaaaatcattgcttcgtggtgaatcgtgggtataagtacgaaacgatcgccttatttgagaaaggacttggtgaattatgattaccacaatcaaagaaggggttgacctccatttaggcgactccgtaaagctgattaaacagcttgaatctggttctgttgacttgaccataacttcgcctccgtatgacaacttgcgccattataacggctctggtgatgtctggggtgaacacgtatggaaagagttgatatcggaactgtaccgcgttaccgcgcctggcggtgtggttgtgtgggttgtgggtgacgcgactatcaacggtagtgaaacgggtacatctttccgtcaagccttgtacgcgatcgaacaaggttttcggttgcatgatacgatgatctatcacaaaaccgctctaccgaagaaccataaccgatacgaacaggactttgaatacatgttcgtgtggacaaaaggcgcaccaaaaacattcaacccgatccgcattccgtgtaagttccctgaaaaggaaaccgcacgacaaaacagctacttttccgaaaccaacgaaaagaaccgttcagcccgttccggtaagaaacgtaaacctgttggcaaggataaaattaagggtaatatctggtattacgctgtagggcgcaatcactcaacgaaggacgagattgcattcaaacacccagcaatatttcctgaacaactggcagaagatcacattaaaacgtggacggttgaaggggacttggttcttgatatattctctggctctggtacagtgatgaaaatgtcgatactaaccaacagacggttcaaaggcttcgaactgatggagaattattatcatgattctattcttcgtgttcagccatacgttaacaatctggaatcttttctatgagttatttgggtgttatcccctatacaggcaacaaacagtcgctattacctgaactcttcaagctgttccccgaaagaagttcatacatgcgtttcattgattgtttttgcggtggccttagtgtgtcgttaaacgtccctaaacccgttctaagcaacgattatgataagacgcttattgatatgtatgagcgtcttaaaacgcttcctgacctgtctccggtgcgagaattgattgcatcaaaggggctggggaaagacaagaaagaagagtatttgaaattccgtgatgaatacaaccagaacaaagatccgttatggctctatgtcctgatcctgcattcattcagcaacgttaaccggacaaacgacaaaggcgacttcaacgctaatttcggatgccggacgcttaacgatgcaacagtaaaacgctttgaacatttcaaaaagaatgtgaaaggcattgagttttccagtggttcattccgtgacattgatatctgtgaaaatgatttcgtgtactgtgatccgccgtacctgatcaccgatgcagtgtataacaagttctggaacgaagatcgcgaacgtgagttatatgctttcctggatgaactgcacagcgaaggaatcatgttcggactgtccaacgtgactcaccatgccggaaaacaaaatgatatcctgattgaatggatgcagaaataccgcgttcataatctggataaaaagtatctgttaggccagcataccgactcttacgagcaaaacaaaacgcaagaagtctacgtgtgcaactaccagaaacgcgacgtaaatacattccctttaacactgaacgatttaatgtaggttaacatgtttaaaatttatggctatatcccttctgtgtataactgcgctccgtgcctgaactcaaagcgcttgctggacgcgaaaaaacatccgtatgagttcgtgtctgttgcggattccgtggaagacggtaaacctgtactgaacgaagcggtgatcgatgaactcgaagcgcttgttggtacgcgccggatgaccatgcctcagattttccatgacgggaaacatgtaggcgggttcgaccaacttcgtgagtacgtccgcaccctgtaataaataatgacaccttactgaatggtgttattatgctgacgaaacgaattaccaaaaaagactacccaactatcaagcaagctctctttaccgaacaagggggctgttgtgctatctgcaaacgtcccctggagggagagatcgagaaacatcaccttgaccatgaccatgcgttagacggcgaaaacgccggacgtgtgcgcggcctcctgtgtaacctgtgtaacggtacagaaggtattgtgaagcacaaattcaacagatccggtcttgtgtcccgtgatgttgactacatccagtggttagagaacttgcttgcatatctgaaacaagattattccgaaaaccgtattcatgacaaattcataccagataaggtaaaatggttttcaagacttaccaaacctgatatgattgccgaaatggtttctatgggcttcgagtacgccgacaaagacgaacgcaaagccttaaccgcaaaatatagaaagcaattaatgaaggcaacgaaatgaaatatctaaacgctcgattatcaacgcaacagaagaaaaagctgatgatgttgatatcctccactgacaaaaagatcatatctctacatgattggatgcttggaaggggtgactctgatttgtgttatgtcaaaccgaaagaccgaacgatgtttgatgatcgcggtcgcacattgactaatttttctcctatcaccgttattgatatgtgggaactccttgagattgtaggacgggatatacctgttgacggggttgaactgatcaaatatcttaacgagattggacacaatttagatattatccataaggcaacgaaatgaaagtagaaaaacgcgacggcaaaaccgtcgatttcgatcaagaaaaaattcgcaatgctgtgtataaagctggcgggactatgacggatgctgatgccgcaatcatgctggttcagtacaatcagatccgtgattttagttcaatgaagatcgcccgtatccaggaactcgttgaagaatccctgatgaaaacgaacccagcggtcgcccgtgcatacatcgaatatcgccacgatcgcgatattgcccgtgaacagaaaagtaagctgttcaaagatatctccggcatggtgaatctgtccaacaaagagatcaccaacgagaacgcaaacaaagacgcacgggtattcccgacacagcgtgatttgctggcgggtattgtagcgaagcatttcgcccgtaatcatatccttccgaaacatatcgtagaagcgcatgactccggcgacatccattatcacgatctggactatagcccgttcaccccttacactaactgctgtctggttgacctgaaaggtatgctggagaacggtttcaagatgggtaacgcggacattgaaccgcctaaatcgatcggtgttgctaccgctctcatggcgcagatcacagcacagattgcctctcaccagtacggcgggacaacctttgcaaacgtggataaagtgctggctccatacgttgaaatgacattcttcaaacatctgcgcgatgctgaacattacggtatcgaacactataatgaatatgtgtatgcgattgaaaagactgaaaaagatgtgtatgatgcgttccagtcctatgagtatgaagtaaacaccctacatactgccaacggacaaaccccgtttgttaccatcactttcggtactggtacgagcgattatgagcgcatgattcagaaagcaattctgaaaaatcgtattcgtggactgggtaaagagggtatcactccggtattccctaaactggttatgttcatggaaaaaggaatcaaccttgatccagaggatcaaaactatgacatcaaacaacttgccctggaatgtgcttctaaacgcatgtacccagatatcattagttcagctaacaaccgtgttattactggttctagcgttcctgtatctcctatgggttgtcgcagtttccttagcgtgtggcatgatgataacggtaatgaaattcttgatggacgtaataacctgggtgtggtgacaatcaacctcccacgcatcgccattgaagcggaagcgcaggaagaagaagacgcacacgacgcattctggcgcatccttgatgaacgtctggaactgtgttttgaagccctgatgactcgtatcgaaagcctacgcggtgttaaagccagtgttgcgccgatcctatacacagaaggtgcttttggtgtccgactgaaaccggatgatgaaattctggaactgttcaaaaatgggcgtagctctatcagtctgggttatatcggactgcatgaaacgctgttgatgtttggttcaggccaacacccatttgatcgtatcggctcccagaaattaggccgattgatcattgaatatctccgcgctgcaaccgaagcatggaagaagaaaacagggtatggatttagtctgtattcaaccccagcggaatcgctatgccatcgcttctgtaagctggactttgagaagttcggaagcgtcaaaggtgtcacggataaaggctggtacacaaacagtttccatctggacgttgatcgcaaggtaacaccgttcgagaaaatcgactatgaagccgattatcattacatcgctactgctggtcatatcagttacgttgaattccctgatatgaaaaacaacctgcaagccctggaaaaagtctgggattatgcgatggaaaaactggactacttcggaactaaccttccggtcgataagtgttttgtatgtggctctgatgacgagttcacgcctacagaagacggtttccactgcaaacactgcggtaatcaagatccggctaaaatgagcgtcacacgccgtacatgcggttatctgggtgctcctgctgttcgtggattcaacgaaggtaagaacaaagaaatgatgcaccgaactaagcatcaaaattaatcaaaaagccccttgcgaaagtgaggggcttttgttatattgcacataccgaaactatgaggtattgaaaatgatgtactggacaaaagactattttgaatttcgcgatgaagaaagttttgggactgtataccgcaatttagctttgcgtggtagtcctctgtcgcctaatcaactttcatctgtcttgtttcctatcaaggtaacgcactgcgatcggaaaggtgtcaatgggattgttgatgccaatggcacaacatggtattccgaagattcttatctgtttgataacgaggatcgcggattctttaaaaagtttgtcgcgcttaaacctgctgttgaaaaagccgacgcgcaacaactgctggattgttctcacctgctggggcgaatttacgtagatggtaagctggtgacgaaacctggcgatctggaaaaattcttgcgtaaggcgcgggaaactaccctgaaagagaccgaaaaacgttacgatactgcaaccgccaatctacagcgtttgtctggtgaactgaaagttctacggggtgaatgatgaccgggataatccttgataccttgtttccctcccgtgtacgtaggcgcgtagaacgggaaaaccgactcgaagaaatccggttcaataagttccttgaggacaagaagaagcgcgaagacgagaaacacccaaacgcaaaaatggctgagggtgtatcgaaatgttctgtcgggcggttctgggttgaaaaggattatcttgacctgataggtgctattgcccctggtgttacgctggaggacttctcccgcgctactgggcgttcgtatactggttgtatcaaccgcttgcgtatgctctctatagtggtgcgtagtgcgcatttcggctatcgtgacgttatccgtccggtgatcccagtaagcagattaaaattttatatggcgggtggaaaaagacttgacttgaccaacgaactgtgtaaaatcggttatatcagagaggggaaagttgttaaagcccctgaatggttcaccaatcaatttgaaatcaaataaggtaaaattatgttcaagaaaatcgtagcattcgtgactggtaaagttgaaactgcaattgaacaaaacacttccccagaagaagcctggcgcagtgctgcacgtatcctgatcaaagagatcgaccgtctgcaacatactcgcgtttctgctgttcaggaaatcgtgaagttgaaaaagaaagtcaaagaacacaaagatcttcattctggtaaagagtcggagatcaaaaaactgctggcggcggggcaggaagtgtccaacagtcattatgttctggcgctgcaacaccgtaacatctggcagggcttgcagacgaagatcgaagaactggaagggatgaacaaagagattgatctctctgtcgttgaactggatcgcaaactggctgatgtcaaaatcaacctggagatcatcgaactgaacaagcaaaccgaaagtctgggtctgactgtaccggaagacgtgatcgccgctgtaggccacacctccgtaagcgtcgataccatcgtgacgaagattgatgtgttgctgggtggcaaaaatgccgcttccgtaacctccgctgacgttagcgcttacatcgactccctgaacgcgaaataagaggaaggggcgaaagccccttttttgctatgtacgattacactattgaacgtgatcgcggtgaagaatggttgatttctcgtgcgagaaacttctatgttaaacttcctaaaaactttcatactttaccgaatgatgatactgatcgcttattgagaattctcgtagatgggaatgttccacagcgagtttttcaggaaatggttgatcatgcgtgttctgaatgggataaaaagtattgcgaagaactgacgcatgatagtatagtaaacagcaaccttaaagacgcttacgaacgaagaagtgtatatgacatttacgaaaaagagaggaaagaaatgatgttcgaagacggcaacagtgcatttaaaccagcacgtaaaacgtatccagactggcgcaaacagtacgcagaacagttatggcacattgacattcccgaagcgctcatgaaagcgattagccctgcggttgactactattcaggctggaaagatgaatatgagttagaagtcggttcgtttaaggcgcacgtcatcaaagcgaccagaattcttgatttcgttgaagctgttgcgtcgtgtgatatcgttgaagatattcgtattccgtcaatcaacgtttcgcggtatagttctcctggtaacattcgcggggatcgttatgcgaacctggcaagcactacggataagctgaactttcacaaaatcaatgaaaaaggatttgatggttgtgttctgatctcaatggtggttgtcacgacgcaaggcgaatacaagctgatcattgattgtgacaaagcggctcgtgcaattcccacaatcaaacaatgctttggtgaagatttcaaagtattgatgaaagcccgtgcgatggaaaagttcatccattcgtgcaaaaagaacgtgctggagaagtatgatccggcgctcacatacaccaaaattgataaagatctggtaggtgatttatgctgattaacaaagcgcagtgcaaagcgattaactttctgctgcacgaactgattgaaaacggtatcagatttgaattcgttgatccgattaacggtgatgatcgtcatctgctccgctgggtgtctggtagcaatccgctggattcagtctcccaggttgtagagtctgcgcataacaatatgccttgtcgtgttctgttgggtagcgttaacgcctcaacatggaatggatctgatgcttattatgtcggattcaaaaaagagttgacggaagacgaatgatgttataatatgcccctgtagacaacaaactataggggctaaatcatgaaaatcaaaaatactgctactgaaaatctttgcaacgaaatcgcggtgacttactggaaagaaggtcacgtaaaagcaatgaaggattttcaacagtggtgtgatacccagaagttagccaactgggaatacgccgtaatcgtggaacggatcaaagaactgatccttgagaagaaaggcactataaaatgattcaactgaaattagacacccaagcgctgaacaacctgttcccagaaggaacacaagcgcgaatggatctgcaagccgctgtcatcaagaatgttgttgacagcgttatcggtaagcgcgtaaccgaagaaatcgaaaacatggtgatcaagcacgtcaatttgatgatgccagccaatcacgaaatcgaaaagattgtgcataaagagtttgctgattacattcagaaacgctatgcatacagcaatgttttcgatatcaattcaggcggcatccgtcagatcaaagaactgatcagcgaacacgttaagaaacagtgtaacgacctgctggattcaatcaagctggaagcaatcaacgatgcaaccaaaaacctcaaagcggacgaagaagcgtttatggctcgtgtaaccaaaaacctcgaagtaacggttcgtcaggaaatcgttaagcgcgtgaataatgaattcccgcaaattatcgacgaagcgatcaaagcccgtttgttcccagaggcgaaaggctgatgaactttgaccgcatctataacatggatgtggttaacggtaaaggaatccgtgtagtgttgtttgtgactggatgcaatcataaatgcgaaggttgctacaacaaatcaacatggaatccccgcaacggtacaccatacaccgaagagactgaaaacgagttgattaaactcctttcaaatccccatgtggacgggttgacgcttacaggcggcgatccgttttaccgcaccaatcatccaacgctcttaaaactgcttgagcgcgtccgtgcgacgtttcctgataaagacgtgtgggtttggacgggatacaccctcgaagccttacagagcgatacagaacgttctaagctgttaccattcattgatgttctgattgatggacggtacgaaaaggatcaaccgactaagaaaccgtttcgcggttcggataatcagcgaatgattgagttcaaaaagaattccatcgaaattaaaaatatcgcttgacctggttggtggttctgttaagatatccacgtagcataaatttaacccaattgagagataatatcatgatcctgaatttcaaaacccgtaaagaagcccgtgactattgctggaagtggtcgatcccgctgaaaaacatcaccaaaggaagtggttcacatccgtggacggtgagaaccaaagaaacccgcttcgaaactggtaaagattacaagctggttgatgtcgaaggtttcactgacaacggcaaaaacattgcgaacagtgttcaatcaaaacagatccaccaattactgaacggtgttgtaaacatcgcaagccgtaacggtgatcgctacaccttcaatgctccggcaggtgttgctatgaacacccttcgtgcatgggaagcgaaatacttcacagaagttgctccggctaaagccccagcgccaaaacgcgctaaaaaaccaaaaccagtaggcaaaccgtctgttgcacctgcaccagcgaaaccggatctggattctgaactggatggtggtgttaacctcgctccggcagtaaccgaaccgtctgttgctaaacctgctgcaccacagccagcgctcgtagaagcgatgcctggttgttttgttgccgaccgtccgtatgttctggtagatgaaccaggtttcctgcgctctcacaccgcgaacaaacgcattgtgcaacacatcaaaaacaacaacggtgttctggtgttttcgaatgttgacggcgacggtgacgcgacaatcacgcaagatcgtagcctcccgtttgtgatgcaccgtgagcgtaaattcttccgtgaactgggtactggtaatccggcaaacactccagcagttcaggcggttgatatttccaaacagcaacacgatcaactggtcatcgctgctgcacaggcagtagaagacgcactggcagaacaccagaaagcgatcgaagttgtagcgcagaaagctcgcgcagttcgcgaagccgccgcaaaacttgcactgctggcaaataagtaatataattcgggggtgcttacggcatcccctttttatttgaggtaatcatggaattattcgctggaaaaacttacggtttaaccgtatcccctgaaatctttgcagagaaaacctggaaaacaggtatcgcaaacatcattcgtgaaaaaggttacgtgacgattgatcgcacctcgatcggtgagttcgaagaccgcgcgtttatcatggacggtggttacgaatatgaactccctgcatcactatggaaatggttcaaggaagtaacgccggaagagggtgaattcaccccagaagaacctgaagaggttaatctcggtaacggggtcgagactgaaaatggtatgcgtatcgcaacgccggaagaggtttccgctggtgtcactggttcggatctgtgcctgatggatatccctaaattcacgtatcgccctgtacaggaaaatcctttgcgtgatctccgcatcgatccatcatttggggctaacctggaaacgttgagcatcgcaccgatgccagtacgtaaatctgatgcaatgcttcgtttcgccttgcaacatgttttcagtggtggtagcatctatcaaatcaacatggaatctgaactgaaaatgcaggaagaccagattgcaaacctgttcgatctgcacactcaattaaccgctgttgaaaatatcgaaaaactgttaggcaaagagaaaaagcgtattttgcaggatctcaaaccatacgggaagaagaatgaaagtcgaaatatacggaatccccgaaagtcttcataactgttacgggtgtatacaagcacaaaagctgttgacagaaaaagggatagaatatacattttatcccgttctgaaagaagcgaaaaacgatctgggctttgaatacgatcgcccacgtatcgaagagttagcaaaacgggtaaggcaacgcagtttagcgtttcaatacccgcgtatttttgtcgataacaaacttatcggcggttatctgcaattgaaacaacttattggtgattaaatgagccgtgaaattttactccctgctgcaaatgctgttcatgctgaaacaatggaatacatggagaaattcgttgaacgcgataacaccgcgatcatcactcctactcacctggacgcgctcgaagatcgtcttcataagcagattaaagatcaatttcctgaaaaggttagccgcaacttcattcgtcaggaaatcgttgcaatgatactgaaacattacggcgttgaaatcttcggtgtcgaaccactgaaaccgaagaaagcacgtcaaatgcctaaacagatcaccgacgaagcaatcaagaaataccagaagaaatacgctaagaataaatgatctttaatacgattgaatgtgttccttcaagcggtaaaacaaaggcgattctgaaccatatcaatcaaacgggcgaaaaagcaatcatcgcttcgatttccatgatgttatcaaaacagtcttatgactattacatcaaccaggtaaaaggaaaacgggcggtgattgtggacacggatcaccgaaccaaaagaaccaataacgatgcgctgcgtgaagtagtcaatgattacgatgtgatctttatcactcatgcagcactcaaaaacattgatgactttgatttgtataaggatttttccctgtacattgacgaagttcctgatttggttgcgttcgaaagtctgcgatttaatagcaatatcaagcacatacgcgagatttgcttgccgtttagttgcaatgccgatgatatcgttgatttaaaacttgacgaagaaaaacgagaactggttacacgattagcctatgatgggcttcgtaaacgtgatgatatcgcaatgaagatgttcccgctttaccgtgctctgttaggggctattccggtgaagatgcaatgtagcgattcgggatatgtctgttacttcgtagaggatcatgacgtaagccagtggaagttcaaaaatgtaaccattgcttcatccaacatcaaagacacgattacagggaagatcctgcaaacgtttcatgatgtggagttcaaagattcaccgcttcaaaagctggttgactttaagcaatacaaaaacactgggcgcatacatatacatgtgctcgcagagggggattattcgcggtatacgggcgatctctctcaatctgggacgacagtatacactcagattaaaaaacgcgtggaggcgcttttagggggcgaacagttcatctattgcaccaacacatacagatcgaagtttagcgaggggcaggaaatcccgtataactcgcacggattgaacttctattcaagttatactaacgtggtggcattattcagttacaacccgttaccctggcttcgtcaaatgttgcgagcggttgcggtgtcctctggacttgaagaggaagaattagttgatgcttatgttgtcagtaaatattacgaaccagcctttcagttatgcgctcgttctgatatccgacacaacaacagcaaaagaaagattaatttatttgtgcctgatatgcggttagcgaaatacatgaaggaaaaatattttcctgatgccattatcgaaaccacagaagcagttcaaacgaaaaggcaacgcaaatcatttcaaacccttttccaaatgacggacaaagagaaaaacgcttttacgccatacaagaaaagaaacaaattagattatgcgaatcctcttcatcacgcgattgttaaagattggctgaacaattaccgtgagaaaaaggcgacttgagggtcgccttttttgtttataaatatcagtattgaataagataaaggaaaacgataatggtagctaaatcattccgcgccacaagtggccttgatgctgctggcgaaaaagttatcaacgttggtaaagcatcacgctctgtgttgagcgacggcgtgaacgttgacttttttaacgaatttaacacgatccaacaatacgattctacccgtggttatgctgcgtttatggctatcatgtacgcgcgtcgtatttggtacgctcgcgcagatattccatcaccagcgggtgctttcgatgaaacaaaatggatctcaacccgtaacgatccaaaatgggtatataacaacgtaacgagcactgacggtctccctcttgaatccggtacgtacttaatggctgatggtcgtttctctgaactgacctatattctgccagatgcccctgttgagggtgatattatcaccattaaagacggtggcggtcttgcaggggttaacaacctgttagtacgttcaaacacccgtcagatccgtttacgtgatattcagtcaagctcttatcgactgactcacccatatataaccgttgcgtttatttttaacggcaacttatggcgtgttgctgaaatgcgtgataaccgtgattcgcagtttgttaatgcgactggtttaaccgctttccaaatgcaagcgggtatggtaacattccgtaacagtggaacgggtaaaattacgttgcagttgcctcgttacgcaaatgatggtgactcaatcacaacttacgatctggatcgccttgcttcggtgaacgttgcgactctgcaagtttatcctggtagcggacacacgatcagttatgacggtatcaataacgtaccctctgtgacttcacagcgttccggttatggtattttcatgttcgatcaggctaataaccgttgggttgtttatgacggtgatcagcgcgttcgtctgcgtcgtatcagtgatgacctgaacatgttgccgaacgattacgtgttcattactcctgttgctggtagtcctccaactgtgcgtaacgttacgctgactcttccgcaagatgttgccgaaggtgatcgtgtgtatatcagtatgtacatgatggggaaaacgcagaactgcacgatcaaagttaaagatggttccggtgaaaagatccgcaccaacaaaaacatgatgcagttcccacagcgtaaggattatccgcctaatgattggttcagtgttgacactctgactttcaatgccgatactgactatcttccatacatggaattgtcgtatctgaaagatacgaaagaatgggtagttgcacagtatcgcccgatcattgaacgtgtcgatccaacaaaccgttctcgtctgggtgtgattgcgctggctacacaggcagaagtaaacaagaaccatgaagatacgccgtctgatgaactggcagtaaccccgcgtacactggcgaataaaacctctactgaaacgcgtcgtggtatcgctcgcctggcaacaactgcggaagttaaccagaacacgacagcaaccttccttgatgacgtgatcgtgacgcctaaaaagctgaacgaacgatcagcaaccgaagatcgtcgtggggtgctggaaatcgctacccaggcagaaacaaacgctggtactgatgacactaccgcaatcacgcctaaaaagctcgatacacgccgcgcgaccgaaaccttagcaggtatcggaaaactcgttacaacgggcgctacgacagcggagggggctttacgtggggatgctggtactaacgtctacaacttcaataacggtgttgatctgatcaccccgaaatcattgaacgagaagacggcgaccgaaaagtcaaaaggtctggttgttctggcgactgaaaacgaagtggtaactggtgctgctgcgggatctgcttcaatgccgatcgtagtaactcctgaaatgctgcatcgtaaaacgtctactgaaacgcgtatcggattgattgagatcgcaacccagacagaaacaaacacgggaactgacgatctccgtgctgtaacgcctaagaagctgaacgatcgtaaagcgactgaatcacttgatggtattattgccctcgctaccactgcggaagttgcagcaggtacggtaacgaataaggcggttgttccggttaagctgaaagagttcttcgacgttacaagtcatgttgcggttgctaccgatgacggtttaactcagtccggcactatctggacaacgattaacctggggattgcgtctgctactgaaacacagcgcggtactttacgtgttgcgactcagggtgaaactgatgcgggtcttctggataccgtgttcattacgcctaagaaactgcaagcgaagaaagcgacggataccgccgaaggtattattcgttgtgcgactaacgcggaagcgggtgcgggtactgctactaacctggcaattactccggctaccatgcagttcttgaacggtactgatccggcgtggggtgcaacgacaaatcgacgcggtgcggtgtttatcactaccaaagcaaacactttcatcggtgataatctggttggttctactcaggccgttgacgattatcttgaagatttctatgctgtatcgcctcgcggtctgaactttgctctgcaaaacttcttaccgaaaatggcaacggcgcagaatagtttgagtctgggcggtgtggttgctgcaagctggatgcgtcgtgatgcaaaccagacggtaactggaaataacacgtttaacggtacaagcaacttcgttggtaacgtaaccactaacggaacactgacggctaacgctgcggtaacggttaacaacaccgtaaccacgaacaataacattaaccagtctgcgaaagcaaacactgtttatgcaaatactgttctgagtggtgaggctgcgggaaccaaaaacttgcttcgtacattccgtggtggcgtggcggatacgatctggcatgaaactgttcagggaagcacgtatcgcctggcgacgggcacaacggatctggttgacgttctgacagtaggtgatgtcggtaacggcacaatggcgtattccggtacgaacattcgtctgaatggtaaagctctggctaacatcaacacggcgggtgatttgtttgttgcaagtacagcaacgcctacggtacaattacgaaccgctgcaactaatggttggaacggtgtaacaatcagtaatgacggcggcacaaccactgcaaccgtgatcaacacccgaaactttacccagcatcttgacagtacctatgtcaacgtagcgggtgatactatgactggtgcgctgtcagttagcgtaaacggtacgggtggacgctttaccagtgtgagcggtacggcacatgttcaggcgggtgatttctctgggaacgtccagaaaatgcgcttaactggcattgacgataaggtattgactgagttcaacatcaatatcaccgattacaacaaagcgatgatcaacggaaacctgatctatcatgcaggtcgtaaaccgactccggcagaaatcggggcggtggcggtagcgggttcaaccgtcgatactctggttgtacgtaactatatcaaaatcggtaacgtgaaaatcttcgcaaacccagcaactaagacttgtgaatttgtgtgggaggaataatttaaatggcgaataacgaatttatggcgttattcggccctgatagtttcacggcgagtgtgttttcagaagcaaacgccgtgaaatatcgccttgttgtccgtggaacgaataacgattctgcggtcaactcggttgaggtatctatcaatggggctgatattattaaccgaaacgtacagcgcggtcgagggattaaccttgctgtaattgacggtacgagtttggctttgctggatttcaaaacttttgatatgtatggtgatcctactacgaatgggactgcgattagtgattacctatctacacttccagcaaacagaattgtatgtttctatacgttcgatgctataaaatctaccgatgcgtttttgagttatatgcgcacaatcggatcagttgcatggcctgaaacacgattctttaacacgccgtcatcatcaacaaacaacccgcaccgttcatcctattcagcaatctattcatccacgatgaaaaagatctgtatggaaaacttcgtaggtggttctggtactggactcaaagacaacacgacgagttttgttgaggttgtattcgatgaattcagtgatatcggggtaactggtattcctgaaagaatggttgatgatgttcaggtatatcagaacagtggcagtgcttacggcttccatttatatgggatgtgggatattggttctactgttttcttgggggacatctttaagttcactggtgatgtttattgctcgcaagaacttcgcaatgctggcggcgaatgttatctctatatgtggacacagaacgcctctggtcaatggatatcctctgcggtactgcgaacaactgggttagctcctgatgaatggcattctctgtcaggatatttcactatccctacggacgcgctaaacgtgaagatgggatgtatggtatatcactacccgtctaccgtgaaagtggggcttgctcagtgtcgcaatgtccagatcagtaaagttccacgaatcgaaaccgatcgcaacggggcggcaattggtgtaaatggtatcaggatgcaaacgctttccgaagttgatgatgctggaacccaaaacccgattgataaattgctttctctgcctgtttcgcctactggggttattagtgacaagaaaatcagttcgcataactttgctgaacttgattatattgtttctgatccggttgaatacacttcgacaaatacagcggagtaccagttcaaagaatggactgctacccagcaagcggcggtaacgaaagcatcactaagcagttacggattaaaagctggtgatacgatccgtatgcaatgccaaatgaaacgcgatgcaaatgcgattgctaacaataaaggcgcatatattgtaatgcagttctgggacgcgaataatacgtatatttcagggatcaacatgcgtgatgttggtacgatcccgaacgtatattcattctacaaaaacgaaggggttattcctgctggtgcggttacgtttgatttcggtttatatcgttatccaaacaacacaaacatcggtacgatatccgctaaagacgttaatttgtcaatcgtgagataaaggggcgaaagcccctttttcataaatacagtcattacaggagaaatttttatggctgatttgaaattaggtacaacgctgggtggtgcgggtatctggagtgcttctaaccttcctctattgccctctggtggacaattaacgtataaaggctggagagtatacacagaaaatgatcgtccaacagcggaggatatagacgcactatcgacgattaacggcggtactgttgcgaagaatactacattcaatcagaatttggttgtgggtgcttcattaactgctaacttgattcaatcgaatagtgttcttaccatccaacgtagcgcaaaccctgcggaaatgattttctatcgtcccgatattacggcaaccccgtcatctgaagcatgggttttaaacatgtatgcgaaagatggtttgaatcgaggcatgggttcgttgattatttctgctagtactgacggtggaaataaagtatatctgcgggcgaataaagacggttcccctaatacaagtttaacgctggattcgcaaacccaacaggtaacagttgagcaaggatcttttcgcgtaatcggtactacgaatcttggtgtgacgaacgccgcatcaatggcggttagcggtgcggtaactgcgaatacagtaaccccgacaaactgggctaaccatgatgaacgatatatgacgggcattcctcgcggtatgtctggaacaagtttcggtgctgctgttgtaactgaaaagaacgatgttctgtcggtaggcggtaacatcaccgacggtccatatggtaacactacgtattacgggcaggttgtcaactatcgccgtacattgaatagtggtgtttctctggttcagacttactatgatataacatcaacatggattcgtgctgcgacgggttctcctggtgcatggtcttatagtgcgggtgatgctaatggatggagaagaatttatgatacttcgcttcctccgactccggcggaagtaggggcagtcaataaatccggtgatgcgatgactggtgttctaacactggcaaacatatctcaaccacttaaaacacccggcggtggtgttctggctaatgacgggaacgtgtatatcaacaaaagcgggtttgcaggatggattgatgctttattcttgaaaaatacaggtggtactgtaacaggaacaatcaaccagacaggcgggtattttgatacatctgccgaagggagaggttcatgggcttcacaaaacaccgcaaaagctccaattttccaaaccattaacacaacagcaacttccgaatactggcctattgttaaacagtattacacacaagctggtggtgcttggtctatgggtacgttggtaaacactaaccgatttaccgttcattaccgcacgagttcggtagatcggcagtggtattttgacaattcaggtgaatttgtatcatctggtgatattattaccacctcggcaaacggatttcgtatcgcatatggcaacaccggatcatttattcgtagtgacggaaacaacacgtatttcctactgacaaatagcggtgatgtttatggtggatataacaatttgcgtccgatttattacagcaacaccacgggtgctgttacaatgggacatacgttatccgttaatggtcgtattagtcaatctagtagttatattgacaatggaaatttaacattaaacggtagcggcaacggacgcgttgaatttattcgcagtggtgcaaaccctcgcgatatgtatatgttccatgctggtgatgcttctcgtggaaaccgtattgaaatctctgatagtgcatcatatctggtttattttgaacgcaacccttcatccggcattcagttggtaatgaacggtaacggtagctttaacgatgtgtatattcgttctgatgaaagactgaaaagcaatttcagtaagattgaaaatgcattggataaagttgatttgcttgatggtatggtgtacgacaaagcaaatcatatcgggggtgaagaaactacccgtgaggctggtttagtcgcacaacaactgcaagaagtattaccggaagccgttaagaaaggtgttgatggtgaacagaacgagatcttaactgtttcttcttctgctgttatcgccttgctggttaacgcggtaaaagaactccgtgaggaagtcagggaacttaaatcccgctaattaaaagcccttcggggctttttctttttataaatatcataaaagcatttgaggatctaataatggcagatttaaaagcgggtactaccgttggcggtaatactatctggagtcaggcgaacttgcctttgctcccttctggaaacacaatcacatataaaggctttaaaatctacaccgaaaacgataagccaacaaaggcagaaatcggattaggcaacgtaacgaacgatgcacaggtgaagaaagctggcgacgatatgaccggatctctgaaccttacaggaccggatagtcaattaactgttccgtatcgcctcctgatgaaacgagcggcaaatggcgatccctatgtgttgtttgtacgtccagacaacaacccaacaacggtcggttatccatcaaacacacttcgtgtaatgactatcactgctcgtgccgcaactacagcagatccggtttctggtgctcaattggctaacgtattagcagatcagacagcacagggtaacggatcactaacattgcaagcatttgcagccccaaatacaaccacaggcgcaagcggtgcgcgaacagcagagatttacctaaacggcaacgggcaagtatctatgacgggttccggtttaacgataggaatgcagactgttgttagtggtactatttttggtacacaaatggctattaaaggcgattcgaaccgaaacctatacttccaggatgctggcggtaatgagcttggtttgatctatgctgatacaggaaagaacttatatgttcgtactggcggtggtgcatatgcaactcgttttgcatctgatggaactttagttctcgctaaccatctaaccgttcctggtcaggctacatttaatggtctgggtgtgttcaataaccgtgcttctgtaggcgtagattatgattcgcaaggaataaactcagcgattcttcgtgttgaaacaaacggtgatggaaacggggttggtgatggtgttacccacttaggctataaagacggcaacggacgatataaccattatttccgtggtactggttcgacttctatcaacaccaaattggggcttaacgtaaacgtaccatcgtattataacgacgttccacagggcacaccagcgcaatatttcttacctactgttggacagggcgggaaaaactatttgcgtcagttccgaggcggtaacgcggacacaatctggcatgaaactgttcagggtggtgtgtggagactggcaacaggttctacagacggacaggaagaattgcagatttctactgcgggttatgctcgattccgtaacgaagttcaaagcgctacgtctggttctggtggacagttccgcgcggtacaaggaaactacggggtaatacaccgaaatgatggtggtaactactataccttgatcaccaactccggcgatccttatggaacatggaacagtttacgcccgattactatcagcttgactactggtattgtttctataggaaacggcgcgaacattaacggttctgttaactttggcaacgcggtaaacttcaacggaacggtcgaaacaaacggtattggttgtggtacgccaaacggattgggtacgactggtatttctctgggtgataacgatacaggtttcaaacaggaaggtgacggtattctcaacgcctatgcaaatagccagcgtattatgcgatggactactggtgcaactgctaactataaacagttacaggttcagggtgttaacgggccagcattacttctgaataacacagcgactaaccaatcatgttatttgctgattactttggcaggtaacaacggcgcatacttcgggtttggtggtgctgatgataacgtatcggtacacaactaccgactgaatacgaccttacagttgcgtacttcggatctgtatatgaaccgtggtctgtatgttgaaggtaacgtaaacgccaacgatgtgtatattcgttccgatattcgactgaaatctaatttggttgaattgaaagattcattaagcaagattgaacagcttaaaggttatatctacgataagcaatcaaaagatgctgatgatatcgtataccatcgcgaatccggtctgatagctcaggatgttgagaaggtattaccggaagcagtgcgcgaagacatcgacactggtatgttaaccatttcaccttcgggaattaacgcgcttctggttaacgcaatcaacgaactgcgtgaacgtctggaagcaatcgaaaacaaattaggggcttaattgcccctctttcatgaggtatttttatggctattgtaggagtccctggctggatcggttcgtctgcggtcacagaaacagggcaacgatggatgtctgctgcgggtaatgcggttcgaatcggaacaccgttttatatgtctcgaatggcgggacaatcggtatataacatcaactttacggtgtatgagcgttactataacaacgcccgttatcgtggtcagtggggggttggttggtattcaccatattcgaaaccttccggtcatgatgcggttggtggtagttttaacggcaacgcattcggtactgtagttgcagcacaatcaacacctgatatcagtgtaattactattcaaaacggtcctgctgtcaacctacgtcttactatggatgacggcggtgtattcgattttgacaacaacggacgtatacatgatggatatcgtcaatatcaggttgtttcttctcaggcgaccagttggtatgactatctgaacgcccgtacaggtcagaaccgttctggtttggttacgcaacgttaagtaaattcctaaatatattcgggggtcggcatccccgaacttgaggtttaaacatggcactattacaagataaattggcggtgcttgaacgggtaatatcgttcatcatggcggtcaaaacatggaaacagttattcattaaattggttcttatcgtcactattttcattatgttcgtaacatggtacaagtgggatgacttattttcagtctggaaaacatcttcaagcgttatagacgtgccgacgatggagattgaaaaggcaaaaaagtttgaatccgtatccatcgaacagttaaacatagtgcatttaactacgggtgcggatttttcggcaatctttgggttcagacctaagaatgtcaattattttgttgatataattgcgtatgaagggaagttaccgcaacagattaacccgaaaaatctgggtggctatcctatagacaagacatcggaagagtataatagacatataaacgggctgtactatatctcagatattgcaagcccgtatcttccaacaaaagaccttgttccggtagcatatacctttagttgtccttatttcaatctcgaaaactactattctggatcgattctaatggaatggtatatacagaagcccgaagtcgccgatacgaagttgatgatcgtgtgcaatcaggccgcaagaattttaggcaggattcgatgataatttcagtttcaaactactcaaagcccgattgatgaaatcttttactttcgtcatcgggcttttatcgtatatgtcccatacgcgcatgagttcgtaaggtgtcggaacatattcatcgttccagtatccaacattacctatcgtaatgcgccggaaaccagcctctacgctgtgatatacaaagaacccagccttacccacaggggcgactttaaaaccgcgtgtagcggctttcatggcttcgtcgtgtgtcatgatagaatcacttcgcctctgtattgattgtgatagatgtatggacgaacacccagtgggtgattatctatgactaagatcgggtcaagttcgtcgttgttatcatcttctgcaactatatcccagtcggtcgctttctgttcttcaacactggcaatgaatacctggttaatctcaaccttacggtgagaacggcgaatgatcgtatccccttcgcggaacacgatcatatctgggttaatcgggcggtacgcggttttacccgcgcacacttcattaagcatttcttcgtatgtcattataatacctttactcgctgaacgattgtttgtttaacttctttgtattcgttgtgaagtttaggtgtcgctttgaagcgaatcacatcaccctcttcaacaattttgtttccgtagtagataaccacgttaccatctacgttgattttggtcatgaaacgttccacttcggtgtaataagaaacttgggtatatccgagagaaatcactttctcaacaaccccgctcatttccatacgcttaccgatttccccgatgtgctgtgctgctgcgatcttcgcctggcgctctgcttcccattctgcgcggatctcttcacgtttagcgatgtaatccttctccagcgctacgcccatgcagtaagagcaaatagcctgaaatactgggctatcgttgccgttttctttgcactgatcagcccaccacagaatcgtatacatcggcatatcagcaatcacttcacctttacgcttaccgattggcatgatgccctgttccagcagttccaggttttcggtatcctgtacggacagtttaccgcgacgttcaaacagatcgaaatctgcgaagccctggaacaccatctggaaagtatcggtttggttcagacgatccaccatgcgatcgaagtattcacgcgctttcgcttccgctttatctgggtcagtagacaggttgcagatatagttatcagaagtgaattcacctccacgacgctctacacgcagagtgtacatagcgtttttagcgccagaagaaatgaaatatgtcgcggtaactttagtcaggttagtcatggtgaatctccttagtggtttcgtttcgacaaggccaatataacaaaagccctcaaccgaagtcaagggctttttatcatgcgttcgaatctttcataactttatgaagatggatatcaaaaattttccagtatgcttttccgcgaggataaatttttgctttatcaatgtcttcgttgcttccccatgtattgtttgggttacgacaacgattttttgcataatccatgtgccagaataagcgctgcaccgatgaatctgtgcctaatggatcttctttgctgaacagaatttgtgaactcataagaagaaacctgttcgaactactaaatcgatctgtttttccggtatcagtggcgctttatcgtcaacgttgcactgataatacatcccgacatactcatgaggaacgttggattcgctcgcccatttcaggttgtcatctgtacgcggccctaacatgaggttaacgatattgacagcgtgatcctgttctggggtattgttgcatccgttcacataatgtccgtgagcggttttgaggatttcaatgatatcttcgtcggcttcaacgagatacagccccgtgttttctgggatttcctcaagaataatcaaagcggttttcatcacacttacctttatgtttctgcttacgttttgcttctttaagtgctcgcttgcgatcgcggtgagtagaagcgcggttgaaatcatgtttcgctaccaggttgttcatcgaggatataatggcacatgatgttgaatactgacttcgccatacagttttacgatagttaagctatcagatcctttaacaattctgtatttttctggaacaacgcggtcgatttcttttttgacaaagttaagcaatccgaagtcatctatatcttttggtgctttggaaatagaagacaacgatactcgttgacgtgaatcatagtacgaagaaattacaaacatatattattttccttattggggcttttcagccccattttagataattaatccagcagtttgcggatcttatccgcgatacgtccggcgcgggttgcgcttgcggtgtgatcgctttctttggtagccagttcagccagcttacgctgatgttcttcttccgctgctttgcggtctgctgctacctgttcgacctgcttctgatcatgcgcaatacgcgcttcgagttcggtcagggttttgtcaaaagttgctacgatttcgtctacagaacggattttggaaaacagtttcatattcattatctcaattagtatggttggaattcaaagtcaaacagatcatttagtgcgcggttgtattcagtatagttctcaccatccccgaaccgcatctgaatcgcgctttccgctattgtaccagtaagatttgagaaaccaaagaggtttttaatcttatcgtgtgcaacgaagtacagagaagcactatccagcaaggccaccatcgctgatggttcatgttcgcggcgtttgatgcgtaacagagtacggtttgcgccagtcttacggcgttgatttggggctacgtagaatcgaaatactactttacccgttttatcatcaactaccaggtagaagccgtgttctttcaggtcaaccccttcgaacttggtgaagtcaccacgcttcatgtcacctatcttaacagcatatttgtggatgtcaagccttgtcagaattcttttcatttttcttcaccagtttatttcctaatttggtgtttacaccagttttcatattcattgtcagtaccagcaagaagatagggcatgacaaaatcaagatcgttgcgccgaacactaagcgaactaagcgaatcaacaacgtcccgatccatttcatcggtatctctacccacttctgaaccgttgcgagtaccagcataacataacccagattaaatgcaagggctgttgcgataataccgtaaggttttttgaagtatgtctgttcaccgtcttctgtacgtccagcggtaacgttgcctccgttccagatttctttagcggttttaatggctgtttctgccccgctcaagttctgccagtagtcgggggtactctgtaggaatttcataatcgaatcctccgcgcctgaatcgctccaggcgctgttttggggttagtagtgactgaatcccacggttacatcacgcatcacctgataacggcatacacgcatcttagcgttgtcgtaatctgtcgggattgctacaacatcgcgaggattgaccttaacctgaatgactcgcccacgtccaccgccataatgaggcaggtacgattttgcggcaacatgcaaaccgcatgaacaggttcggtttttattctcgtctacctggttacgtggcatttccaccacaacaccaggggagttatcgaacttaccggaagccagatcgcggaagtcttcacgaacacgtttccacgcgtagaaatctccgtcatctgccagttcgatatcattatgcaccatgaacccataaagctgatacacagcatcgcgtgaagggttttccatcaacttctcgaagaagttaaccaggtgctcgtaagggcggtcgttgtacatttcacgaacgatacgttgcgtgatgccgctgtcaaacacgatatctttgtacaggactttatgcccgatgattttaatgttgcctttgctgtaaatcttcaacgcttgcgttgtgtccaacagggtagcaactccctcgatgtctcccttaaccattaaagcgtgtgctttttcgaagttagggtgtgacgaatccgctgtgatgatcttgccgtccagtaccagagtaatgaacgattcagaaccaatcattttagatttgacatctttttgcggaagtggtttcgtcgcttccgtattatacttagcgtgttgctcggtaataacgcgcccgatggttcggacgcttacaccaaattgtttagccagtgcggttttgttcgcgctggtaagaaagccctcatagactgctttcttctgtacatcgtcaaggatcttaacgtttctcattatttccaccgtataaggttaatcaggttcgtcttgatcttatcgtccgtaatcatagtacggcctaaagagtaagacgaattgcgcaacacatacaccaatgcagggttgcgttcttcaaacaaatcaaaggcggtatcaacacgttctttcatatctttcagcattttgtaatgcttcacagacatttcacgaagtaacgggttacgcaccacatttttggatttgtttttgttctcgatagtatcgtaggtaaacttaccatcaagataatcaagcaacaaatacaattctgaattatagcggtttttcaccatgcgatcaagagtcacctccagataatcgcgaagggttcgaacctcgctaccgtgtttagacgagatccaggctggataccagttaggcttcatctttttcaccgcgtcggcaaaacgctgtaccagatagtcatcaagacatttcatgttgctatctggaatgcgactccacagagagtttcgcagaaccataacgcctttcagcccagtaactttcaacagggtcatcatactgctggcaatactacccagtgtatagttcggtgcttctccgtccagtcggctatattcatcaagcccatagaggcgcatagcgtacatttcatccagtttcacgaactgtgctttagtcaggaacagatcatttttctgtaagttaccctggtcatccaggaagtaatgatatgccgtaggcgttttcggacgtggttcagaatcaccagaagatgattcacgcgttgctttccagcgcttgcgatcttcggtgtacgtttcgaattctttggtcaattcactggttttcagtgtaacgatctcagattcatcgaaatagccagtttcaatcaactgacgcacagagtcacttttacgatcggcagttacgaaactgatacgatccgaaccgttcatcatgcagtaaccgatcagatacgggcggagtgaacgcgcttcgttatcattttcaacgatgaacagtttcttctgtcgccacggttggatcatgcgcataacgtcctggcgtttggtggtttccgctttatacttctcataacggcgaccagaacccacacgttcgaatacgcaatctttcccgtcatatgggttagcccagaagccccacacatattttccggttgctgtatcagggtttttgatgcgcgtcagaatttcagccagcgattctttacccacacggaaacggttatcacgggttacgaatgtctgtaacaagctaggcagattattgaaccatacgagtttatcgcgggttgtcttctgctttttatactgttccatcaactcttcatcaaagcgtttgttgattttatccagtcgatccgtaatcactttcttcgtgactttatcaaggctcaactcttcacgcgacggcatgaagtccagcgatcccagagggaaatccagaatatatgcgtaattgctgttacggtagcagtagaacagcgagttttcaaacatatccaggtcgattggatagcaaatgttacccatacgcgcgtatacgcctgaatagtttttagactgataacggatgatcccgcgatcgtctgcttcttttggttgccagttaacatcaatctgaacaccaataaagcgcggacggatacctgtaaacggttcataaacacgcgccgcttctctttcccattctgcgatatcttcaactttcacaggaacggtgatttgaacgccgttaggttcgtctgtttcgatttcgtagatttggtcaacgaaaggttcaccattatccatgtaagccgtgtatgcgcgtttaacgccgtcctggatggattcgatagtgaatgtttcggtgtaacagaacggggatttactacccagtcccagcgccccgatcagttcgtcggtgtcggttttggtggattcgaaataggttgcaaacacctctttaaccatccagtcacttaaccctgtgccgtaatcacggacgatgaaacgcggatcgagaacagttggtaactgaacatcgaacgggttcatgttacccgctaccatatgaccatcaatggcgttactggagatttcgcgaatgattgcgcggatcttgtatttgtagatggttgatgacatgattttgtatgttttcgcactggtagccattttaaacttcgtgcgttcgcctttatcgaagcccgtagtgtgaatggtttgtggtgctaactgacgcaatttcattgtttatatctcacttggtgttgaagatgatgttatcacatgaatatttcataggcttttgatcaagcccatactcaacaggtgtacacatccggtcaaggtattcgtaaacctgttgcttctgacgttcgcggtctttcatatccatgataccgaccacgatagcagttacaaaacatattgcaatagtacacagcacagctattgtaatatattttcccgtttttggtgcatcatatggtttcattgaatcgcctctgcatattgttctggtgtcaatttacgcgctactaagcgccctttggttgctcgtttgtttcttgaaatgtagatgtttgcaatgttgcgtttaccttcctggatctcattgtacatcttttcggtcatattgcactgataaacttcaccgttcggagttttcaggaaaaacgcgtatatgtctttttcgctttcctgaattactgatttctcacggatacggcttttgcatggtgtaggctgtgcgcccaactcgatagctttacgctgccatacgatcccgtgtccagccccttcggtcagagcatgtgcaatttcgtgcatgagagtatctaaaacgttctcgtagatatcttccttaacgtgagaacggcttaattcaattgacttgcgactgtaattgcattgtcccagagtacgcttgaaacgtccgttaattttgaaagaccaatgagataagccatgcttcgccatgatgcttttggcccagatggttatttccatatcgctacgagttttgaacattttatatcctccccaatcagtgaggacactatagcaaaaaagcctcccgcgatgcaagaggctttttgtaaattatttcaatttcttcgaaagttctttcaaatcattgagatattcagttttcggggttgtttcttcccagtatttcagttgcttacgcagttcgttcgcttcgtcttccagcttttgacgttcatccgtggttagatgatagatgttcatcgcaaccaggatttcggcgtggttctcgcaacccgtccacgtagagacaagtttaaccgcttcgctgcgactaagccccttcaacgcgtcaggttgtgcgatcatctggtcaatgaagtcaaccttcgccagcgccttatctaacgcttctttagtctcctggatgcgtttatcaatacgctgttggtaaacaccaatacggatatcaacgaagtctttcagcaacgtttcaggacgctcgtatgaatgcagtttcccgttaaagataacgttgatgttcgggtttgagttctcaatcaatccgaaatctttcaggatcttctcacgggtaagcccgtttgcgtactcacgtttaagggtgatttcgtagcggaaatcttcttttgatagatccttgtagcttacgatataccctttctcttccagcttatccaggatagagatatatttcacgcgatcgtacttgaccggaatctctgtgatcaccagtttggttttaccctggagttcatacttgccgtaaatagtaccgttttcaatgtcacctttgaaatgcgggtatttcagatccagtgtgaaatctttcccgttcaggtaactaacacatccattcagaaccgaaatcggatcgtgtggtggaatgttggtagcgtatgctttcgcgatcccgctgaacccgttaaccagtaccatcggaatgattggcaggtaataggctggcggtacgtgttcaggatcttcatgtgggattgttaaatcctcgtccatatagatagccttgaacagcggagacagcttacatttaatgtaacgcggtgcgccaggtttcttaaccagacgggaaccaaagaacccgtcgcggtcaaaaagcgggatgttattgcaccagtgcgccgccataagagacaatgcctcttcaacggatgtttccccgtggtgataaccatacattgcaacaccgccagcgatagaggctactttctggaagcctgtaccgcctttcgctgcggaatgcacgaagaaacggtgaacgggtttgaacccgtctaccaggtgcgggatcgcacgagaataaattgtgtaaagagcaaatgtaagcccctccacctgtacaacgtctttaatacttctttccatcatttcaccgaaaatttatgttttccgttcacccagtctttacgcggatcggattcatcaccgaaacacagttccagaacgtctttgtattcgtcgcccagtacgattgtatcgtattttaactggtcgcccaacacccgatcgtaatcttctttacgtaaagaacccagccctttgatatatcgtacctctttcgccttatcgcggaacggtgcgaaatcttcaagggagtagaaccatttttcatctttaccgactttcgcaatgataatcggtgtgcggatataacggatctttttcttctcgaacaactcaggccagcggctaaagaacgcaatcagtagggtgagaatatcgcccccgtcaacgtccgcatcgaccatgatcccgatgttgtcgtaagtcatttcggaagagtcgcctggatggagattcaggatcgccatgagttcagacaattctttgtttttgagcacttctaagttactcattccccaggtgttcaacggtttgccacgtagcggaaatgcgccttgtgtctcttcgtttctgcactcgataaactgccccacagcggaatcaccctcggtcagaaacaaagtggtttctaccccgtcagtgtcgatccctgatgccggaacatgttttgcaaccttcgcctttttcgctttcttcttcgctttggtaatggctgcggcttctgctgcctgtttgcgaatcagagcggactcaatgatcggagtgattatttcagaagtatccataatctgtttcgcgatctttttgtagttcagtccggcgtggttgttgaactccccagcggtgttagtcagtttttctttcgtctgactatcaaaagctggtgcattgaagttatgcaaaaacacaaccaaagtcaagcattcttttacacgggctttcgggatctcgatagcgtgtgttttcttgatcatcggttcgagttcggaatagataccgtcgatcatggtgtcaacatgaacaccgccgtttttcgtatccagaccgttaacgaaggatttctgtttgaaaccgtcttctgtgctcgccaagatgaaactgattttgttgtttgtctgggtaatcgttttatcgccgtacatcgcgccatacatcgcgaatttgttcgggaggatatcgccgttatatgtgaatttaacggcagggaaagccactgcaagcgccataaggcgatctttgatgacttcctttgtctcttcgtcgataccgtccacaccgaagatagagaagtcaggggtaaacttaacggttgtcccttgctccttcgtcgggctggtgcggtaatccatgttctgcgccccgtccgtacagttgatcgtgactttgtgtttaccgttggatgtttcgccgataaagatcgcgctgtaacagtttgtcaggaaagaacctacaccgttcatccccattgttacgcggttttcgtcatcgaagttagaaccggatttagccattgtccaggctgcaacaggtttaggaacaatcttcccttccggcgttctcacgtcatcttgtggaataccgcgcccgttgtccgaaatcgttaccagattgtgatcaatcttcacttcgattttgttcgcatatttgaaatcagttcggatcgcttcgtcgatggagttatccaggatttcgttgatgattttcaccaacccttccacgtattccactttgcggaattgccccatgataaaacgttcatgggcttctttgttcactgaacccacgtacatattcggacgtttgcgaatgtgatcgcgatcgctcaagcagaatgattcatccaccttagcgccctttgctggggcttctggtgctttctgcggctcgttatcgtccattaagaaatctaaactcatattcacctcgttattagttctcaggcattatatagggttctatgaaaaagaaaacccctttcggggttttacttgttgtacgggaatccgtctttcaccatctgcggcttatcaaccgttcgtttcgcctcgcccccgcaatcacaatctttcggttcgtcgcggcttgcgatgctggacattttcggaaattctttttcgcacttggtgcatttataggtatatgttggcattaataaatctctgacaatggaataaaacggatcggggttgcggctttgctgaaaacacattgcttgttccctgcaaacatgagatcagtttcgtacaccatacaaatatatccctgattctccaaaatttgccgctcccagctatcgaaccatttagacaacttctgcaatgaagagaagccgaaaatatagctacgataatttttaccatgttttttgaggttacgcattaaacgaaggtcttcgcatggtgcggggtgacgagtctcggagataccgaagtttaaaccgaactcgattccatgaatatcgagatactcatagagatcgtcttcatcaccgacacaacccgtatacggccctaactgtttgcaccaaccatcatatgacgaaaagatagacgctttcaattcaacgcgataaaccaacatgatccgatcctcgtaattgattaactacaagtatcgtaccacttatctaatttcttatcaagcagtttgttgatcacctgtgcgatttctgttgttccgtgggttgtgctcaatttcaggtaaatcacatccagtgcgcacacgatcgcatcaacgctttcttcgacgatatcaccgccgcgttgaggctgaacgagacattcggagatctccccaacctctgcggacaggtggtgaaccacgtcgctaacggttcgttttttgacgctatgagcggtcttgaaaaacttatccagaactacagcggaattttcgcgcgttacttcctcacctttattgacgtggatcgtaatttcagtttctggttctggtgcaacccataccggattgaaaagccctttcatatcgttgaacttgataggaacgggaataccttcaagataaagaatccctgtttcttcatacaccatactgatccggcgtggtgaattgaagtccatcgggttcttacgcaacgcatcatacatacgacgaatcgggtcggcttcggatgccatttgacacacagccattaacatagatttcggggcgtacatatcaccaattttatacttgctcatttacaatacctttatgataaccaacaataaaacagttcacttctggacgttcgccgggaaaatgcacacattgcatgacgcgttcagccatgagttcttcgcccaaataaacagaggttgtttcttcgttgtaatggcaatcatacgaagttttaacactcataccaggcaatccggcaatatgcataaactttgagttcgtgcatggttttccctcgatgctttttccgtttacatcaaacgtcatatgcatttcggttttgctgttctttgggcgtctgctcatttattcacaacctcattatatgttttcaggttccattcatgcacttccggcactttggagtaatgatccaggaatactaactggacttgcataacactagcacgatccatattgaaaaggaagcgttgcggggaagtaatacacagaaaatcttcggtacttcctctgcttgcgctaaactcttttgtttctccgccgtcaaatttagcatatacaggcgtagaaaaatacggggcgaatagttcgcgtttggaatcgtccgtaatcgcactgaaacacacgtctacgagctttccggttccttcccgtctgatggtgagcattgtccctttcgtgcgccctaagacgtttacagagcgcgtagtgacatcaccaaaagcgtttgtgtaactcacagtctccacaaagcccatatcacgacgctgttgtagcattgcttcgtgttgtgcttctgcatcctgttctactactcgttgtgcggcttcatacgccgctttgttcggatctcttgattgccatgcgaagaataaaacccctgcggctatcagtccgaagattgaccaacttgcggtcgctgatagtttcattttaatattccaaaggggccgaagccccgattttagcgaagatagcgaacgtacccgctacggtcgatcgcgttctctgggttgttgaagatattaccgcgaatacccttagcaggtgctttccatcctgcggctttcaggatattgccgtcattgtcgatgaagccagcaactgaacgctgattgaacatttcaccagtttctttgttgcgggtatcctgcacgatacggtgatacttacggcctttttccagaacgaacacagtttcggtgtaatcgctgaaccacatgccagtgttacggcctttatgcatcgcgtccagtaaaggctgtgctgcggctttcagttcgtcaaaagtatacatggtaaaatctcctaagtgtgtttcgtttctatgggataactatatcaaagctatcccatgaagtctttagcaaaaagtgctatttgttaaacccgtttcccttgataccatttcgggaaaacaacccgctcgataaaagttcttcccaggttgaaactatcaccgaacaggagaacaccgaacagcggatcgcgtttgatgtcatttttcccaacagttttcattttcccttcatggatcacggtgtcgcccaccgtgatatccttgatgcttacttttacatgatgcatacgatcacctctgcgagtttagcaggttttgcttctggtctaactttcaacgcatcattcagattcttttcaaccataactactgcgtcgttttcgttgaaaccgttcttaaccaggactttaactactttggcttctaagtttttcatgatgcgttccttttgtctgtttcgtttcgatgtgtgtaatatactgcatatcgaaattcaggtcaatacccaaatcaaagaaaatcgtatttttcttttaatttttcgtaatacgtatcccatgcggcttcgtcgttgatgatctcagtaccgaaccgataagcacgtttgcgcagttcgaaacgttcacgaatgcgctcaacattgattttcactgattccggcgttggttgccaatctgcgcacaaatgacgatgaaacagggagtttgacagcggactaagatcgaaatcttcgtatgtaccgtccatgtattctttaccattacgcgcgaggtattcagcacgtaatgcagcatgacgatcgcgaaggtatcccagcttattgtaaaagaaggttacgtgtccggttcccagcgtatacacagcagggatttttgacaggttgatttttgccttaccggataaaacggcattgggaatgcgagggagttcgcgcagttctgcaatcaggtgttcgttcagaagaagagaaggatcgattgtgttaatacgtgtcatagttgcctccgtttggtatgtgcgcaatatacaaaaaagccccttgcattgcaagaggctattaaaattattttgaaagaggtataagcatctttcgcataccgccgttttgtgtggcatcatacacgcgtttagcatccataagggagagttcaacatggtatgatttccctttcccgtcaaaatcaaacgttaccgtaccgcttgctacgcttacatgagtaaagatgaactcacccgcgaaatgctttcgaaacgctttgtcgtgatccaggaaccattcaaacgcttccccgtgctggtacagtctgacgataatcattgaaactatgatgaaaatcagaactgctgcgacgatcgtaagctctttcatcacttacccctgtttacagattgacggtgtaacgcacggttaacgcgtggcgcttgataaggtttcattttgtacggtgttggatcagagtattcgatccggttaggtaatgaatacatttcaacatttggctgaatccagcggattgagtcgattaacccttgagttaacgcacgaccgaaacctacaccaactaaacataaacgcataatatccccttactgtgccagaatgtgaagccattcacccaaccacacgatcgcctgataagacaaccacaccgcgccggacacacaagcaatcacaccaatgatcgcgaatccgattaaaatgttcaaaccttctttcaaatcaccaaacatgttttatcctcttttgtttcagtccctacaaaataacaaagcccctgcacgaatgcaagggctttttatcataattcgactaactgaggcaatttcagaaccatccctggaaggatatagcttgcattgctaacggttttgcggttcaacttagcgatagactgccagcgctcaccacaaccgtataatttttcagcgattgaatacatgctatctccaggctgaacaacatattcatcgtattcgactttaacgaacgcggggttcatgagaatgtcaaacatctgcgctttcgcttcgttcagtgtttttgcatgtacagttttacctacaaatgataatttaatcatcttttcctcggcagactcaatggatcggtttcttcttcacttgggggttcttccagccccagcgcatatctcaatgaatagactatcatcaaaacatctttcgcgcaatcgtgaattgaattatgcatcacaaaaccatcaagcaaccctttccgaagaggacaggtcgaagcatcacgcgttaacaggcggttttcgatacatgtacgcacatcgcgactattccagaacacggtcggcatatcttcgaagatgtcgatcttgccaaccatcttacgcacgatatcaaccaggataccgcgatcgaattcagggccacgaacataatcgagtgattgccaacggctcacaccgtccgcttttaggtcttcaaagaattgtcgatgtcctgcatagagttccagatcttccggcgacggtttcaggatttgacgggcttcttcgctttgctgtttccaccaggcaattgttccctgatcagcaatacgatcaggctggttacgcaaatcaaatttgtactttcgtccccgtgcaaccagttccgcgaacgttggcgggttgtgtggatcatcaacaaacggaacgtatgagagttcgatcaccttcccgttcggggaagggccaaccgtttcataatcccatacgtaatctacgggtaaatgactcatgccgtcctctgcttgatatattccataaaacaagccagcgccagcgcaacttctgggttgatgtcgatggtttcaaactctttgctttgcaaagtcatcataccgaactgacgcagaccggaattgtagatcgccttttccagacgggtagcatgatctacagcatcgaaaaattcatacagaatatcataatcaatgtgtaaagggatctcgattctgggtatcttcgaaatcaggtcagcaattgcttccgcgtggaggcgagggatctggatagatatatcttttttcatgatattagtgtccatatgtctttatcttcacgaatgtttcgtgccattcgaaggatcagcacgataacgccatattcatcataagtcagttcaatttcttttgcaataggagaccatgaataacttggcccgttcggagaatacagaacatcgttagatttttcaatgaagcgcaaacggtgaataacttcttgcggatctgctgcgctatacatcccgaacatattgaacgcatgtgggtctttttctcgaattttatcgagtgcttccagaattcggggaatgtcttttacaaggataatcaatttcataataacctcaaaaggggcaaagccccttatacataatcaacggtgtaacgtgcgcgggttactcccacatagattaactgcttacacagatcgtaatctgcgaacgcatacgcatcgcgcgtgtacatgtacgcatggtcatacgtgctcccctgcgatttgtggtacgtacaaaccggaagaggcttaacatcctggaacttgtttttaatcgcccagaacgaatgccacggggctttatagcctgtttgctgcttgatgcgcttataagtgctcgcaacgtaggccagatagttgcccagacggtctttcatcaccggatcaacaacaacttgaatctgtgcttcggtttcctcttcgagcgataccgttttcaggagatagaattcaagttcgatcttctcgtcgcacttctccgccttgataacttcccgacgcgggatgatttctaagactcggattttttcgttgttattatacacaatctcggtaaagatctgcccgttcaaccgcatttcctgaactaacggttcctgcatcacgatcacttcatcgagaatgaaaggttctgttgttttgtacaggtgtttacggatcgttgcgttcagcttgtccacgttgtcgttagtgtaagcgaacatgcggttctcgatcaagtcatccggcgttttgacacggcggaaatactgacggaggaagtcaacagcgttagcatgttggaacacacccagatcaccgacagacatcggtttcagcatcttaccatcacgtacagcccgtgaaacctgaataatcgggttcccttctgcctgacgcatgattttatccatacggatgacatcaaagatttcttcatcaaagaacggggagagttcaacgcgtccatcggcgtttaccggacggatctgatctttatcacccagtcccaaaataacagcgttgcttggaatactgcgccggatgattcggaacagatccatatcaaccattgagacttcttcaacaacgaacacgcgacaggtagacagatcaggcgctttctttcctttctgctgttcgaacacacgcagttcttcgttagtcacagggctaatcttcaatgcagaatgaatcgttgttgcgtccattccggtagccgctgctaacacgtttttagcctggtgtgttggggcagttaaccaaataccgctaatccccaaccctttcagagtgttaaagacaaacttaaccagtgttgttttaccaacaccagggccacccgtaatagttgtatgaatggcgttctggatgttgtggatcacgcgatcatgcgcggacttctgatcgtcgctcagatcatcaaatgttaactcgctcataatttgagtaataccccttgaattttcgaattctcaataaaccaacgcatctcttttttctgttcttcggttgctggtagttgctcggttttgcggaagaaactgaaacgcggttcgtccggcgtgtagttcagtttggtttcgtagcacttgcggataaaatctaatttatcttttgcaagttgcggtgatgcaaacagttccggcgttttcccgttttcaacgtgtggaatagtaaagccgtctttgtctttcgtaacaatgatatagtatttgtcaatcattttcgcccctcatagatgacgtagaaaaaacctataacccatagcaatgataatactatcaaagcggcttttctgtcaacaccgttaacgtggaaaacgcaccatccaaagagatacgttatcaccgcgcaaacgatataagacaaagcaaatacggcatgtagcgcggtgagttccattagtagttgttagcccaacgacgcaggttttccgcctgtttcagagcatacagcttgtagatggtttccgcatccagtcccagcgcgaggaacttacacatgaagaagtgccactggtcaatcagttcaaacatgatttccagcttgtcttcttctttcatttctgcgaatacctggctacgcagttcctggtgatttgctttccacggtttccagacaccggaagccgcttttgcaccgcgagacataccgcccagagcggtgtaaagttcgcgggtttcgtctgcgatcgcatcatcttgcagtttcagccagtccaggatctcaccgcacgttttcagttcgttcggacgtggaacccaattcagggtatcagacaggctttgttgtgcatggttttgcaagtccagcatcttttgcagcgggtcaattccgttctgcaatgcattgcggtagaaaccttctaccatttccagatcatcggctttaaccaggtgcgcacagctattaaacacaggagttttatcagtcatatcaatctcattttttcggtgatttgttccacgacttaaaccgaagttttgccgtgagtccagaaacagtattatctttcaaatactgcatgatttcaagtttagttgcgccgtccgtttttatcatttcgttgatatcttttgacggccacgggcatttgtcccacaacacaaccttttcgccagcctcaattaattttaaaaggcggtgagtagtatcagggtgtctcgcttcattgtcaagaacccagacacgcatatttttatacggaacgtcagacagcgccatttgtccgcccgtaatcgcaccagcattatctacaaacaggctatccagcggcccttcaagcaggtagacaggtttcaacggatcgatggtatcttgaccataaactttcgttgagtgttcacacgctttgattgtcatgtattttgcgttggcattgtcacgtaaggcacgtccctggaatgactcgattttacccttttcatcaaagatagggatcaccaaacgcggttcatccttcggtaaagggtatgcgtccgcattcacagagttaaccaggtgttgccattgacgcgtaaaccagaggcggtcatatttgtctttaggtatgtgacgacctgcaacatacttaacgataggg

SEQ ID NO: 36 - DNA, 177756 bp, Unknown
  source: /note="Description of Unknown: KP2M-M0108 Bacteriophage sequence"
ccttcgcatttagggcatacgtgcggatacttcgctttcagttctttggagatctgacgcaaagttttctcgccgccgaacacagcacacaattgctgtaaatcagggattcgaagatcggcgggagtaatcacactaaatttcttcatcatatatttctcacttaaagaattttttaatgaaagagaggaacaatccaccactgaacatgatccagtatcccgcgccgtcaccgttaaacaggacatacacagcgacaccatagcaaaagatttccgcgatattcagtaagtttctcataactccctcctttgtctacaccaggtattttaccagaaagtagattactgtcaacaacaaagttttatcaacccacttatcaccagtcattagtaatcccctacaggttgagaagatgcaacgctcaggatacggaaagagcattcattccatttgcaataagttttcgcacagtgaacagtgcctttcattacaaacccgtttgagaataccagccagtaaagtttcatgattgcctcctttgtttcgacacccctaatataacaaaagcccctgcacgaatgcaagggcttttttcaaatatttttcaacatgtgtagttgaggcggacaatcttttgaagcaatcaggcgatccaggcgtgacataacgcgtctgtagccgtcatactcgaacttgattttgggtgcgatgtaatttacatgtatcgcgtttcgcgtgttcaggctcaatgtatactcagggataacggttcggaatcgtaaagcaatcactggcttttcgtgagcaaccgaatcatccatgttttcgaacatctggacggtgaacgcacaggcaaacactttgccattaatccggcgatatgcaatgacttcctgcataccttcgtttttcgctttcaccgcgtaatacagaacgttacacgaataatgtttagcgagactattaagaatttcactgtagatctcaaagtcttttttgactgacgcggaacgatccaggaatcggtctgcgatgtgatctgtagtcattgaaacctttgtcacataccaatcacttaacgctttactgaaattttggttaacttctctgcgtaagttattgataacatacatcaatcgtgctctgttcataaatcacccattatgtttaaagtattcgatttgacgcagacgtttttccgctgcctctttcgaatcatattcaccaagttctttcgtgcgatcgtggttcagtacaacccacttatcgccgcgatgttcgatgtgctccgtgatgtcttcgactttcttatccagatccagcggttcagcatcttcctggatgatagtcaaatctacgggcaatgtcaacagtcttttaactccgctgatatcttcgatgcgggaatcatacgcgagggttacatgtggtttgtaatcgtcataatcgtatgttgctccagcatccattgcatctttgaagcggctatggagataatcagactccagaacgcccacgatcgtattaccgtatttcgtttcccacttctccacgtcaaccagtcgggcaggttcagagataccggatgcagggaacagatcaaccgtcttacggctatacacaatcgttgtatgcagctttgcagcggaaacaggattctctacacccagaagtttttgcaccttcgcgagcgcttcacaggaagcctgatcgaacttcgcacacatatagatccccgaatcaactacgggtttcgctacttcaagaaaacttttcatgtgtactccaaatgaaaaaggggctttcgcccccagtggttaaacgcctaagcgttaattatgcttttgatgcatcaatcgcttcattatcaccagcgatttctactgttgctggcagaagtgctttgatcgcgccgatcagggcatcaggggatacaccctgcgaaccgtcgatttccagaagaccgcaaatctggcctacgagttgacggtgatttgccagttcttgttctttaccctgaatgatttcgttcaggtcgaatacacgggctttcaggatcaggacatcgttttgaagctgttgggtttggttttgttcagtcattgtttacactcttaaaagattgaatacattaagcacgttacgtttcaaatcgtctaacgtaccattatttaggattgtataatcagtcaagccaggtgtcaaacctttctccgttgaatgattatcttcaataccagtttcacgttcaaggaacacaaagcgagtcccgaacttgctcaggtatttatattcgtgcggttgacgcacatcggtaatgataaagtgatccgcgtaggatttcaacattttttgaatagcaattgaagtccatatagacggatctattttacaaacaatatcagtcccgaacacctgcatcaaacggcgaatcgtccagggctggctgttttcttcgcaaattttatgagcgataacatctgcgttactcatgaagaacccgcgagaacttaattttttgataccgctagaaaacagcgcgtatgcatcgttattggacatcaccagcggggcttcacgatcaccctcatagaatgggttcttcgctgccagcgctcgcaattgcgtgttatcgtgatgttccatagaacgtttcaggatagctttgatttcgtcggctaacgcgataacttcaacattacggaagttatgcacaaccatttgagcaacggtatctttacccgttcgctttttaccacaaataccataaatcatttttgcgttttccgtggagtaggcacgatcacccgtccgtcgatctcaatttccatgtgagcgaagttgaacatcgtcatacaggatacggcttcatccgaatcattggtatacataagctcaagctctccgaggttggagggccaagcgccatagaagcgaaatgtcgctacagtttttgactgcgagttatccaggatatgcaaagccattgcctgttgtggttcactccaacgcacggaatcgaaggtgttaaaatcgacagtaccgagcatccaaaggtaaaccccaagatacgatcgcagttcttcatcaacagcaaaacgaatagtcagtggatcgaactccattgcagatcctgggatcttccctcgaatcattgggttcagtgggacatccgtaattggaatgttgatagcaggtagtgtaacaccctgaacttgtagtttcaacccttttacataatcattgtcaggaatatctaacatgaagttagtaggtgaaatctggttcaggatcatagcagttgtattcatgatgatctccattttatagatatttagatcaagaccgtgagcgaagcgaacacacgaacgaagtgagtgttatgtacgatgtactgtttataatatttatattttatatatagagaaaacagtacattttcgtatactttttatacaatcgttaactatccgtcttcgcttcgcttgacggaactcgcttcgctcgcgatctaatttttagttgatctattcaataaataggtatatcatacctatactttcaaaagagattgaaaacatgaaatcattcaaagaactactttctgaatctgttcagaacaaaaaatttgctaagaccgttgatctggttgaccgtggtaacgctgcaaaaggtcagattggtttcctgcattttgcacatggtgctgattacgatgtgtatgcgccggactcccacgatctcgcttacttcggtaaaggtgttgtccgcctgaaaggtaaaaccactggcaaaactcaggcagcgtatattgactgggcgaaaggcactgtttcattctacagcggtgatcctgctgatgacctgaaatttgacaagccactgaaattcaaaggcgcttccctgtacaaagaggccgaagaaaaccttgatctgtataatcagttggcggaagatttcgaaattgatctgcctctggatgaagcattggtgaaaggaaaggtgtacaagctcccaagtaacgatatgtgcttgctgtataccggacgtaccaaaaccaaagaaacaggtgaatacgccgtgtttacggttgtagatgcctctggtaagcctcgtctggtatcgggtaaacgctttacccaagaatacaaaggcgatgttctgtctaaactggttctcgctgaatcggaagatctgaacgaagccgctaaagatattcgcgaaaaagttattgcggtgttggtgaaacgtgggtttaacgaaaaagacgcagaaaagatggttgataaaaacctgaaagatgcgatgaaggttcgacctggcgcaacccctggaaaactcgcggaaatcgtgagtaccctgtaaaaataaagccccttcctttcggttggggctttttgttaatatctgttccaaactttcttcgcgctgtatggttttcctttggactggaaagcctgtgtaggcaaccaaactgctttcgcccaatcttttggtgcgatctctgcaagtggtgaacgtagatgggctggcaggtaggctttgatcatttgatcagccccgcgcattcccttcacgttgttccagttgattttcagtctggttttgttagaaagtcgatctgttgatccgtagccacgtttcaggagttcttctaaaaactcttgacgtgctcgcggtggcgcatagtgcaagttcagcccgtacagaaccaagttacccgctttcgaacgtcctgaacccaggaaaatgatcagcgggaaccgatcccagtatggcagggtgtctttgtatttcgcatcgtagatgaacgtatacaagcgacccgttgctggtttcgcaaccctgtgcgtcttaatgctggttttgatgaaatcaccaaaccaatcggtcgaatctttctgacgtttcgcagcggttacaccaacagtcattttcttcaaactgttgcggaaatcgtttacgatatcaaccgcgtgttttttgcgatagtcattacgtttgcgtcgggcttcggtttctgctttacggcgttcgatttcatcatcaatctgctgcttatagcggtgcatagactttgtgaacgttgcgtatgcaatcccgttttcgtccgcgaactttttggctgtcatgccttttaattttgcgcgtcggaatttgataccaagttcaacccattcacccagctttcgcttcggtggcggttttggcttgtcttcttctgcgatgatctcgaactcaaaaataaaactcataattccctccgtttagggtatttattgccctttccatccgaacacacgtttcaatgtgtcctctgtgatgatcttgaactcccagcccttttgttttgctgctgcattcgcggctttccatttgtcgatgtttaccgcataagtatacagcgcatcaacaaatttctttttgttgtgaacgttgttgttcgctggcttaggtgggggcaacgtttctttcatcggtttgacttcccaaaggtaggtcacaccgttatccatttcaacatagaaatccatgaagtagcgccgtcgctttccgtctgcgttgctgaaataagggatcacaacctcttcactgttccagcgtttcacatgcgggtttttatcaagccagttcataatatatttttcccagcttgaacgatacgttatctttcgcggatctcccttatatttctgtatgttctggggcataaaagaccccttgtatgtctgtcttccagccattttagatcctaaatatagtaaacattagataggggaaattacaatgttattttcgttctttccaccagttgattacaaaggcacaccaactactgatatctaccgcgattatcgtttttactttaaccgcgtgatcaggaattataagccgcgtacatatcaactgacaggttcattaagacccgaacaattagcggaaacgctatacggaaaccagcaatactactgggttatcctgatgcttaacgataattacgatccgttttacggatggattaccgatcaggaaacggcttatcaatgcgctatccagcgttattcaaaagcaggtggtgaacaggttctttatcatatggatggtaagggcaaccgttattacaatttggttgaagaccctacgaatcccggtcattggtatgacaaaggcgataagaacatgcgttatttgcagtaccagggaacattagtccctgtagatatttatgaagatgcggtgcttcaaaatgaagcaaaacgaaccatcaagattattaacccctctgatattcaatcgtttgtaagcgattatatcaaggaaatggaaaaggcaaacctatgaaatacggtggaaataaatactcccctttctttgagggggtggtcgaagaagtcgatgatcctcgtctactggggcgtgttcaggtgcgtgtattcggtgagcatccggcacagaaacaaaaatctgaaactatcggtattccagttgaggaattaccgtggatgatgcctattcaggatattcgcagcgccgctatttctggtgttggtttttccccgactggtatcacgcgcggtagttttgttatcggttactggcgcgataaatggcaccaggacggcgttatactgggaacctttgcgggtgagtaccgagagaagccggacacccagaaaggcttctgtgacccgtttggtgagtatcctcgttatgtaggtaatgatgtcaacgtactggctcgcggtggcgcagaggggcgcggttcttcgagcgtgattattcgtgatgctaacagttcgttagctgtcaatccagatgatcgcccacttgacgagatcccagaagataaccgtcctgatactggcgggttcactatcgaaaccatgcttaaacaggatgaaggtatccgcacaaaatggtatattgatagtgaaggttatccgactatcgggatcgggcatttgcttatcatggaaaaaacccgtgatactgcgaagattaacgccgcgatcagtaaagcagttggtcgagaagtaaccaatggaacgatcacagcagaagaagtttcaacgctgtttgctcaggatttggcaaaagtccggcaggggatcagcaacacttcaaacgttcgagaagtatacgtgacgttaaaccgtcctcgtcaaatggcaatcgaaaacatgtgcttccagatgggtgttggtggtgttgccaaatttactaatgctctggctgctatgaagcgtcaggactggcaaaccgcttacaacgaactgcgaaactcaacatgggctaaccagacaccaggacgttcttcacgcgtatctaaaatcgtgctgacgggcaacctcgaatcatacggtgttcaggttccagatccagaagggcgttcattgagtgctgcatacaatgctgttgtgttggctgcatcaaacccagaagatccttttgttcctggtgatactcgcgtaatgttcgaggaacctaaatccgcatacgctgctgaatatccatacaacatggtattcgaatcccgttctggacacattcaggaattcgacgatacaccgggctttgaacgttacaaccgtgttcacccagcaggatcatacgaagaaattcgccctgatggaacccgtgttgttaaaatcgttggtgatgattatcaaatcgtcatgcaaggccgtaaattaaacgttaagggtaatttacaggttgttatcgagggtgatgcgttcatttataatatgggtaacgttcaacagaccgttgatggtaacgtgaccgagttcgttcgcggtaatgtaaatcaaaccgttgaaggtgaatatttggggctgattaaaggcaacgcagaattaaccgttgaaaaagatgcaaccgtaaacgtgaatcagaatttaatggctaacgttaaacagaatgcaactgttgccgtaacagaagatgcaacaattaccgcaaaaaatgctctgattgatattgagcaagatttggatattggcgcacgtaatatcaacatgcgagcatcgaataatactttcattgattccggcgcactgactaagatcactggcggaacagtccaagttgggtaatgtatgaattataaacgcatctacaaagaaatcatcgagaacaggagaaataatcctgttagtggaatggttgaagtacatcatatcattcctaaatctatgggtggtgacgattcagagggcaacttgattgccctttcacccagggaacattttgttgcgcattatcttcttgcgaagattcacaacaacaaatctatgtggtgtgcgtactggtttatgtgcaatacccgtgacgtgaaaataacatcacgccagtatgatacagcccgtaaactttcgagcgaacatttgaaaggaaatactcatacgctggggcatactttatcgcaaagtcatcgcaagaaaataggcgatggtgttcgtggagaacgtaacggaaactacggtaaaactttttcggaagagcataagagaaagattgccgaaagtagaagagggaaaccacacgacgaagaatcccgtaagcgtatgattgaagccgctaaacataaagaaaaagttacctgcattcattgtaatcgtgttcttgacaaaggcaattacaagttatggcatggcgacaaatgcaaaatgaaggtaggctaaacatgatcatggattatgaaaccatcattgatgggattatgcaaaattttcagcatccttgcgatgctgagatccccgctggatattacagacgcgttatctggcagggacacacagaaaattaccctgctgttggggtagaatgggcgaccgaaatcatcccgatcggaactcacctgtatacgagttcccctttcggacagaaaagcgatccgcttccggtggtgaactctccaaacgtacccacgaatccagacggaaccccaggggtttctactgacattctggttacgaagattggttattatttcgccagtcaagcggatattgatgcctatatcgcatctatcggggctactaagctcgcgggtaatgactggtacggggcggatctatcaaaagcgaatctgttcaagaaccctggcgaactcgcgatgtacaaggtggaaaactccggtggttacttgctgacttccggcccccgttgcgatcagcgaatccgacaggtatacaaccagactacaggcgcgtttaccagcattgattactactggaatggtaatcgtattgcgtacatgaaacacgacgaatcccccgcacaccagtgcaaatatacagggatgtcagtaaacacgaacgcagataccagcattcctccggttcctcctgctctcccgtcaacgtatggggcgctaccgagtgaagccagattgttttctgctcgctctggattgggctgtattccggcgaccgtggggttcccgtatacgaatatcagcgatgctatgctttccgcgtggaacgagactcgtaaaacgttcaagctggctttcgatatgctgacgggtacaattaaaaatggctctggtatcgcgacgatgtttgacgggctttcaatcgggatggaagaaatcacagcgggtgctctggcattgtcacagcaagcatggcaaaccgcaatgaaggtgttccggcagatcattagctctgcgtttaacatcgtgggtggggcatggagtctgatcaataacttcctcccgactgttgcgatcctgggtgttgcaatcaacatttacgatctggtgtttggtgatagttcggttcaatccctgaaagattctttccaggctctgattgactccggcgcacagacgtatgaaagcgtcataaacgcaatctacggggctataggcagttcttacaactacaccgttgaatatgtcaaggctggcgctcgcgaccttgtagacgcttgtagcgcgttatttgactggtgtttgactatgttccaaaacggttgcgttgctctggtggatttgtacgggcgtatgatgcagatctggtcaatgcctcccgaaacaccaaacccgctttggtctgcggtgctggctatccgtaacatcatgcgacagattaaacctcttgatgtgattctgggcggtaacttcccagggtttacagcaatggatctgtatcagcaagcacaagcgaaagtgaaagcgttcattgatgcatcctatgcgcagatctccgcactgtatgatcaggggcaagaactattcaacaccctgaaagcacagacacaggaaagggattcgattaaacgcaagttcgatcagtacctaaactggatgtgggaacctgtaacggaagcaacaaccgctgcttatcaggctgcacttgatgccgctaacgctgctgtgaatgcgactaaggccgcatatgagggaatcaaagcacagattgctactttgcaagatggtatgaaagacacctacagtatggcaatggctgaactcaagaaactgcctgtaatggctcagattaaccatttcttaggttactgtggggttgcattcgatgacctgttaaaaacgtatgagaacgcgctgacgggcgcacaatcgctatataaaaactttgttgacagttcccgctcgtttaaggacacatgcaaggtgatttataaccagatttgtacgcttgctctaagtaaggtaactcaatacgtaaacaaattactgtcattaatcggactcgcgatcacattcggttcaattagtgtttgcgtccctatggttcaatactaaatacccgataacgaggggtaataatggctactacaaagaaacaaattaatcagatccccgatatctttgtcggggctacttttgacgaaatcaaatctgacttaatcaactggctccgaggtcaggacgaattcaaggattatgatttctccggctcgcgcatgaacgtacttgtggatctgttatcatactgtacactgtacattcagcaaatgagtaacaccgcactgttcgaatcgtttattcgtaccgctgcattgcgtagttctgttgttcaacaggctcaggatttgggctatatgccggactcccgcaccgctgcaaatacttcgatcctgatcactgcgaaaaacccactgaacccaacatcgatccgtattccacgcggtacgaaattcatcggtacagtgaaagaaacaaacagtttcccgttcgtcgtatccgatgacgtggtgatcgttcgtgacaaaaacaataactatgtttcgatgctgaacatcgttcaggggcgtttagtacgtaccgaagtcatctttgatggttcgactatcctgatccgcgatccaaacatcgaccgtagccaggttcgcgttaccgtcaacggcgcacaatgggatgactggacaaacgaaagtatcgtaaacgcaacgggtgcatcaacagttttctatatgcgtgaaactgttgatggacataccgaagtttactttggtgaaggtgaaaccagccaacaggtcgcgggtggtgctctgactgctgattacatcgggggcttgaaacctgcaaacggttcaaccgttgttattgaatatatttcaaccaacggcgaagaagcaaacggtgctgaaaactttgtttacgtggatacgttgacaaacattagcattacgagtattgttgagaacccgactaattcagcggactatgtaggcgctgatggtggtggtgaaccggaagatatcgaacgtattcgcgaactcgcgcctatcatgcgtgagacacaacgccgttgtgttactgcatcggattatgaatcgttcttgtctcaccgtttcggttctgttattcaggcggttcagtgctttactgataaagaaaaacctggctatgcgttcatcgcggttaaaccgaaatcagggttgcgcttgacatctgttcaaaaagaggacatgcaaaactatctggcgaagtataaccttgcgactattacgccgtcgatccttgacccgaactatctgtatatcgtacaaaacatcaaagtaacgtatgatatcagtaagttggttgaatcagaggaatggttgcgtggtcaagtaatcaatgaagttgacagatattatactgataacgttgaaattttcaacaaatcattcagtaagtccaaaatgttaacatatgttgataacgcggacgtgtcgatcattggttcttctgcgactattcagctattgcgtgaacttgataactattacagcgctccgatgtctggtattcacttcttaaaccaggtgaaatcacgttctgttgtttcgaacgggttcaaatacacaaacgctgctggtgattcgtatgatgtgcgttatgcatcaaccgatatgaacaccacaaccggacgtgcaaaaattgttatcggaccattcaaaaacggtgatatcagtatcgcagcctatacaggaaccgattttgataaatatcctggagtgaccgatcgtaataaatattacgaagtcggctatgtggaacactacactgatttcattagtttcgatctgggtgtcctgaacgttccatccgagcgattcagcgctgcttatatcgaactgactggtacaccattggaagagaacattttcacccgtgatggttctctgattgtgtttgaaaacgatctccgtcctcaatatacaacattgacaatgaatccaatcagtcaataattttaacccctgtcatccggcaggggttttttgtttgctaaatatgggatataagtaacgcaaatttggagaaacataatgattaaagcgccgtcaattaccagtttgcgcgttgataaactggctgctaacttcgtttatttgaagtgggatagcgtcggcatggatttttactatgtcgtggaaatggcagaaactcgcggggcaggtggtgttactattccagatgaagatttaacctggttccagttgggttacgcttttttgaatgaatggttttcttccgatgtccagccaaacaatttttataaattccgcgtcatggttacgcacaagggctttgaaccgtctgattgggtttatacagatgaattatggacgttcagccttaacgcctacgcatattcaacaatgcgtgaatttacgccaagtgatgcattcataaacgaaaaattcgcaaagaacaatcagaactacgttaacttcaatacagatgtggtaatggcagcgttgatgaaagaagactttgtgttttctccactttacactgacgtatcccagatcagcgataaaattcttacacaagaaaactatcacgaaatccaggatcatattgaacacgtttgtaatgacattaacagaactttcctggtagcgtcaaacggtttattgtacctgtttgaacgttttcagaacatggcgaaggtgtcaaacgacaaaggacaaacatggcattactacaaggcgtttaacgaccgcgtaggaaaccctgtatcgcgctctgttgcgtatcaaagccgaaacacaacctatgtactgggttacgatcgtatcttctacgggcgcacctcaacggatattcgctggtctgcggacgatgtgcgattctctgctgatgacgttacgtttgccaaactggggaaccagactggccttgatttcgacgtagactcatacaacacgtttgctaaactgcctggtaacgtgtcgaaatatgcagaagcaatggcatgttccgatgactggctttatgtggttgcgaaaaacgttgtgcgtcgtatcgctctgaaacagacaccgatcgacaccgatccgagttctcctacgttcggagaaaagattttcgatacagcaagctatacagttgtccctggaaataataagatcgttgtcaagaaaatggatgtgatgaacgggattctttatgcactcgttacgggtgaagtgaaaaccgctctgcaagatcctacaaaacccgctaacgtggttccgtccgctgctgctggtgtgtatcaatggaaagaagacacgaaaacctttgtgcgcctgtacgggaacaccgagaaagaacgtttttatatccagcatgaatacaccaatatgtcaacgaacggcacggagatttttatttccgtagcaaactacaaatatccaggcacacttcccgatcctgaattgttgatcgagaaccctgcactggtcggtgctgtaaaatatgatctgcgtcctggctatactgccagccttgcgattaactttgcgacgattcgcgctcatatcgacgacccgactgtttggaaatttggtgcgcaggaatactacaacgaggcgaattatagctggttcttccgcgactctgtgcgcacatggatcactaatgataaccgtcctctggtggtgtatccgaaaatcacctacagccttgtaaccgatagtgctggcccttcgtcatcgcttcgtgtgaacaaagaggtatgggatcgcggacatgttacgatttacattaacaacattaagtttaccggattcacgaagtatacgaacggcgtgttgctatataagagttcaggcgaaatcatcgggttctttgaactgagttaccgcgctcgcgataacttaacgattttctggaaaccagacaatacgttattgattgccgatctgattcagcaggaacgcgaaaaaccgtatcaaccggatctgtcacctggtttgattgacccagatttaagccatatgattacgcgctttgcgcctcaaagctatctggatcagcagtatttcgagaagttcggggaatactatttgcagttcgtttcgctgggtgaaaacacctactataacaagctgcttaacctgatcaggaacaaatatccgcgtgagaagaacagcgtagaatatctgtggtcggaagtaaaccgccgtaatatctacctggataaaacgaagcgtgatcaggtggttcgtttctttgaatctcgttgtagtgatttctactcaacgaaaggcatcgaagcaagctataaattcctgttcaaactgttgtataacgaagatgtaagtgtagaaatcgaaagttcgaacactctggaatatgatattctggttcattcaacaaatatcaaccaggatattgtaggccggacgatttacacaccaacagcgagagcaaacgtgacgtatatcgaacgccagtatgatgacggtcaattacgttggtcagtaacgctgcacaacgtgatcggtaacttccttgaagggcaggttgtcaagtctgaaaagactaacttcacgggtactattctgcgtggtgtgcgtggtaagcaaatggcgaacaactcgatcgactacttcaaccgtgggcgttcttactacgtgatgaaaattcgttcgaatctgccagcgtcccgttataaggatgacgttttacgattcgtgcatccggtaggctttggctttatcgggatcaccatgctaacggtgttcatcaactccggtttgtctatgacgcatagtgaaacgatcattgacattcttcgaaattatcgcttcgatagcggttatccgaagtattggcctgatcgcgtagcccgtctggacggtaacggaaaccagacatttgaccttgtaactggtgaagcattgtacggcccgcacccgaaagcgggacaaccgtttgatgttccgccacaatatgacattgatgaaaaaccgctgaatggtgtactgccgtccgcgcgtcgatttgatcaaagtcctctgttcgatagttcagcggttaaatactctcagttccgtaacttagtggaaaaacgattgaaagacgatgcgggtaatcctcgcgatccgaatccaccgactcagagaaaggtagcataatggctcaacaaaacatctaccgtgcggtcgtaactggtaagttccgcacggaaaacatgatgaactttcgcgaaatgatcggggacagccccgatcgtaactcgatttatatgtcaatcgggcgtaccgaacaatgggcggataacgaatccgaccctgaattcgctcccccttatccgaacgatgatacagatggtatcgttgatatgtggacgcatatgatcgggatgacgaaagtaccaggcgaaatgattgatgcaatcgttccgcgtaaagactggggcgatactcgatatccaaaccccaaaatcttttacattaatgacatcgtggttgtaaactccgcgccgtataaccgtactgactacggtaaaggatggatggtataccgcgttgtagacgttcctgatattggctcttgttcaatctccagtatcacgggtaaagttgaatgtgtgcgtattggtggcatttggacaccgacccacgaatcgatcgaacctccacgcggagaagcgaacggtatcgacatgggcgacggctatatctgggaatatctgtatacaattccaccagatgttgttatcaaccgctgtacaaatgaacatatcgttgttccgttccctgatgaacttgaagaagacccggttcgttggggttatgataacgtgatcaaatggtatcctgatatgtacgatttggtgtaccgaatgaaggttcactcaatgcgattccgcgcgtatatggattccctgttcttcccgcaagcctctttacctggcaaccgtgggttccgtcaaatcagcgttattgtaaacccgctgttgaaaaaggcgcaaccatccgacccagaagtaaaagcaacgaggcagtattacacgaaaggacagcttgaacttgactcaggacaaatgatctacatggaaaaccgtcaaccgattattcgttctcctgatcagaccgaagaagtcagtattattttcgaattctaaggaaaccataatggcatatcaaactggtaaaaaattaattgacgtggggcaaatcggcaacccgtcaactggtgacccgctgtatgacggcggtgttaaacttaacgaaatcatcaccaacgtatacaatgcgtttggtgatgtgcgtttactgactgcgaatgatggtgtgggtacaatgttactccacgcgaccggatatttccagaaattaccgcgaacctattattcaggaaacccgattgaactaggttcactgcatgatatggatacctctacagggccaattacggttgtgcttccatcgggtaaacctggcgaggggttctatttcataaatagtaacggtagtatttctgttgatcgtcctgttgtattccgtccgcaagttggtgatggtatcaaaggggttcaggatcaactttacgtgacctctccatatactcagattaaaatctggtgtgtgaagaaagaaggttccgttactacatgggattattctgttgaatcaatgtttggttcaaaaacaatgcctgtagatactactaaactcattctgaaagcatcaccgaccgcaattcctttatttggttatagtgaattcagtggggcgaaaattctcgtgtacgcggagaatatgacaggcacagtcaataaaatggctgaaattcttttgtctgttgaccgtgtcgctaagggcgtgtattcaactgaatacgcagttctcaaaaatagcgaagatgaaatgtacacgcttacgttcactgttggtgcgagtgatattgtttacgcaaacgtacaatccaaaaccgagaatcgcattaaattctcgattaaagcggttgacaccattaaatcagggatcgcagcatgaaacaagaaattcttatcggtaacgtggttgatgacggcgcgggtgattatctgcgtcgtggtggtcagaagactaacgccaactttaccgaattatataataaactgggtgacgggagtatcccgcacccagcgggtgcgtggaaaacgcacacagcgcctacgctgacccctattttcggtgaatcatgggcgctgaataccagcaacaaccgtattacggtaaacctccctaaaggcagtgtaagcgattataacaaggttattcgcttacgtgacgtatggggtaagtgggcggtaaacaacgtccgtatcgtccctgcaagcggtgataccatcaaaggctcaccgacttacaaagaactgtacaaagacctgatggacgttgaacttgtttattgttctcctggacgttgggaatatgttgaaaacaaacaggttgacaaaatcacaacttcggatctggcaaccgttgcgaaagaaacgtatatcgcgactcagggacaaactgacttcctgaacgtgttcggccctggtaactcgtacaacgtccgcgcactggaagtttactatcgcggtaacttgctgtacatcgacgacaagagcgggtttaattcatcaaacagcgattacggttcacctggtgcgagcgccggacaactggtagatctggatggtgtaaatatccgtcttaaaaacccgtgtaacgctggtgacacgcttcaattcgttacctatctggatggtattgctgcatggcgagcgacgtatgaagcgcataccatgcgcgtatataacacgggcgacacagaacaggttagtatccctggtgaaatctgggttggtgatttatcaactaaacgcacgtttactaatgctgaatttgggatcagtccccgaattttgattaacccaaactcgttcgaactactgttgaacggtcgccagcttgttaaagcaggtgatgcggatctcccgacatttgtttgtgagggcgcagaaggttatgatgaaagtagctgtattgcgaactccggcgcatgggttccttctggacaggattacagtctgatttttgttaactccgtggttacgggtattaaatttgctcaacctctggaatcccgtgatgtggtaactattcgctggttcaacaatgatatcggtactgtcatggaatgggacggtgtaggcggtattaaagaacacaccgataagatttacctgaacaacgaagaagaagtgacgctggttaatcagattgaatataccgattataacaacccaacgcagaaaacctcgcgtaaagtagcggatacatttagcggtcgtcttctggatctgcaagcgttctttgatgttattcacccaatcgggacaatctacgaaaacgcgcataatgatgctaacccaggtgattatatgggctttggtatctggacacgttacgcggaaggtatgttccttgcaggttggacaaccgatgcatcggatagcgattttggtctgaacaataacgatctggacggttccggtcaaccaactcacacttctggtggtactggtggcgaacgtggttatgaaattaaaccgatcaacgttccacaaattcagtcaaccgataaggtgttgattaaagatgacaacgggatcattattattggtggctgtcaggttgacccagatgcaacagggccaggttacactaaataccgcgaggatgtattaaaagtaaatcgggggaacactactccagataaactaaaaacgctcccgccttatattactgttcaccgctggataagggtagcataaatgactcagtttatttccaaaacaagggagggggcgaaagtcccttcccgcaaagcagactttttgcaatatgaaatgggtacgaaagaaccgctgattggcggtaaacgtactattggtggtgcaaacgtcgatcagcttcgaaaaggggtagattaccctaacgtacaatcagcaattgatgacctgtattctttgtctcaacagatccccatcaatggggtaatcatgatgacggaagatagccccccttctgcggtgcaacaggtagaatcaattacgtttgatgggacggtttcaaacccagatccagatcaaacacaggcgactattcacgtttatggtttcccgttcgttttcggcaatacaacgaacgcctctaccgtatgtgagacagtctataacaaattcgttgaattcgtcaacgatgaaaaatatttcgatttggttactcgtaaaggtctcaacggggaaattctggaagttcgttttattgattcagttccgcatccggttactaataaaactgaatatggaatttcgatggtaggaacaatcgacgtacaggctaaatctggttacggtacatggacaaagttaggtgaaattgaccttgctgttactccagcagttccgatttattatttcaagcgtattgcatgaggataacaaatgaacaatacaattaaccacgtaagcgataaatccgtttacgtgacatttgatcctgctggtacgcaatggcctagcacgtttaagaacgtacaacaggcattagccgctattgggccgtgggcgcgtactgatgttggattgcctaatgccgcgcctggtgtgcgcggtattgctgctattgcgacacaggcaatgattgacgcgggtactgacacacagacgattgtaactccggctttgctggcgtatcgtttgcaaaaccctcatgcatcacaaaccgtatggggttacactcgttacgcaactgatgtagaatcagtaacagtaacaaacgatctggtttctcttactccgcgctcgttgaactatgtgtttaacacccgtcaggcaaaagaaaacgtttggggttctgcgaaactgtcaacaactgctcaggcaacgtccggtactgatgacactaccgcaatgactccgcttaaagtgaaacaggcaatctctgctctggttccggtacagtcaaacgcaacagaaagttcgtttggtcttgttcagttagcaacagttgcagaagttcgcgcgggtactattcgcgatgggtttgcgatttcaccatacacgtttattcgtctgactgcaagcgaaagtgatttaggtttactccgtatcgctacccaggcagaagtaaacgcgggtactgataacaccaaagcgatcaccccgcaaaaactcgctgctgtgaagggttccggctctactttcggtatggttaaattaacaacagatatcaataccggattagcgaatactgctttgtctgctggtgctaacgtagtaccgagcaacaaaaacagtgcaattactggtggtgcattgtatcagggttcgattagtgctgacaataaataccagacaaagacagatgttgacgcaaatatcccgatcggatgtatgatgcttgcagcgtttaacgccgatgttggtaacttgtttatctgtaacgggcgagcgatgaaccgcaattcaaacccagaactgtttgcccgaattggttatacatacggcggttctggtgatattttcaacttgcctgatatgcgcggtcttgtagctcgcggctttgatggtgggcgtggtttggatgcaggtcgcggttttggtacatatcaggctgatatgtttgcgtatcacgaacatgatctccagatgatttaccagaacggcggtaatcttcctaagagtcaagcagtttatgaactgaaaggcgcagaaaagaatgaccaacgtgttatgcacctgaataacgattacagcaaagcattaggtactggcggaaacgaaacgcgaatgaaaaaccttgcggtcaactacgtaattcgagtacgataaaggggttaatccatgatttcaaaacttaacccgttaccaaagatcccgtttgttgatggtgtccctgcggacaccacacaaacccagatcaattggattgttaacggcgaaactctcgatggtgcaaaaaccaaaaccactaacgagggttctttaaacagatgcggtgttctggttcaaaagaacgcggtacaattagaagcaaatacaactacccagacatcaaaaatcaacgaagttatcgatcaggttaacctcattactgaaaacctcgcggcgatctctgatgatagtgtgatcgacaaactggataaagttgtcgctgatgttgacgtgctgaaagtagatatgtctgctgtacaggcaactacagcaagcaacaccttgaaagttcaggatatcgaaaaagaagttggtgtatgggatgcgtcaaccgatcctaaacatcgtaccattcgaaaggatattattttcctgaaaggtgaactgggtgcatatcctggcttcaacgaaaatggtgatgtcgatccgtcctctactggctccggcgtgaaatacaaggtaatggctaacgctcaggcggtatctatccatgaagcacgtattactaagctggaagatgactgggtaaactcagatgtaggccatttaaccgacgaagttaccgatctgcgtaacgaaatggggccgaagcatttagccactttcgaatctgtgtatgttcgtctgaatggtatcggtggcgatatcactggtattaataccgaactgtcaaacatcaacacttatatcgggcgtacaggctcaggtggttctggtagtatagattcccgcatggaaactgcggaaacgaacattactactctgcaaacccagatgaatgatccggttgttggtgttctgcctcgcgtaatccttctggaaagcgctgttggtaactcacaggttccaggtagtatccgttacgatatcagcacaatgaaacgtagcattagcgatctgaatatgatcgttggtgaaacaagtgatgatggtctgcgcggtgaaatggcacaggttatgaccgatatcggtactgactctcagccaacgagcatgaaaggccgtattctgaacctggaaaacacacagcgcgacgatcaccaggcactgattgatgttaccgcaattgtgggtaatacgtcaactggactcgttgcggctaatatcgcgatgggtaaagctgtttatggtgacgcaaccagttctgatccattcctcaaagatggtattcagaaaacggctcgcgataacaaaactgcgatcggcgttaatactacaggatcagaaacagggatttataaactgatttccgatctgactgcgcgtgttgctgctctcgaagctggcggtggtggtaacgttgaacaacgtctggacgatctggaacagaataaagcctctcacaaggatgttactgatgctctggttccgtatatcacagaagttgaagcggataacaaatacgaagcgaagaaagttccactgtcatttactcaaaatctggtcggtcgtaacgattatatcgagggtgatgatatttctttatctgttaccgttacaggtggtaaactgccttatgtgtaccagtggaagaaaggaaccgcaaatatcgggactgattcaccgagtgtaatgatccagaacatcacaacgagtgattccggcgtatataaagttgtcgtaaccgacgctgaaaataccgtgattacttctgatgaacttgacattacggtatacacggttcctcagttcgatacaaacttgagcgatatttctgttgctgatggtgaaccattgactctggaagtagtgtttagtggtggtaaacctccatacacttacgtatggtataaagacggttctgtactgactggcgaaactggttcttctatcgttaaatctgctacaaccagcgaagatgcgggtgtttaccatgtaaccgtaactgacgcgatgaatagcacaagcgattcagcaacagcgactgtcacggtagcataattttaacaaggggcgcaagccccttttgaggatcatatgattacgaacaatccagaacagttaaaggatgaaattcttcgtcgtctgggcgcaccaatcatcaaaatcgaaatcacacaagatcagatttatgactgcattcaacgcgctttagacctgtatgcagaatatcattataacggcacaaacaaaacgtatctgattttgacactgggcgatgataatccgcgcaacgtgttcgacttgagcaaagagcacatcttcgcgatcacgaaggtattgcgtacaaacatgggttcattgaccacaatggacggtacagcggtttatccgtggtttaccgatttcctgatggggctgactggtggctctctgggtgggcgctgtgcatcgagtgtgtacggtatgaacgcatacggcgcggatatgggctactttacccagatgatgtcctatcaacgctcaatgcaagacctgctggctccactgcctgattactggttcaacgatgatactggtcagttctgcgcatgggggcaggtgaacaaaggtgacattatcgttattgaagcgatggttcgttccttcgttgatgtccctagctccgtaggaagcgtcgcaggatacgctacagcgggttctaacgcagtggaagaccaatccatagccgacatctacgaaaacccgtataacagcgttgtgggcggtgtacgagcgggacagggttcaactgttacgggcggaacgtctgcatataacaaccgatgggtaaaagactactctaccgcactggtgaaagagatcaacggacaaattctggctaaattccaggggatgcaattgcctggcggtgttgctcctgatggtacgcgactgatccaggaagcggaaaccaaactgcaaagtctgcgcgatgaactgatttcgatgtctgacgcagtaccgatcattatggtgtagggggaataatgcaaaactgggatgaaagtttattcgctcagttgtctacgggggaaggggttgatcgcaacttaaaggatcaggtcactaacccgtatgtaaactggtacaaatacaacccgacacaacagctacacgattcactgacagcagaatcaatccagatgaaatcgcctgatatgtattacgtccggcgcgacttcgtgaatattgataagatcctgggcgaagaccgagaatccaaatttacgaagtcatggaaaattgctgcatatattgaatcgtatgccaactatgaaggacaacgagatttctttagtaaatttggtctgagttcaaacgatgaaatgacgctggtaattaaccctcgtttgttcgcacatcaaactgatggtggtattcctgttctgggggatctggtttatttccctatggacaatagcctgtttgaaattacgtgggtagaagccgatccgttctatcagttcggtgatcgtcctcaacgcaaaatcaaccttgcgaaattcatctacacaggtgaagaactggctcctgaattgcagcgaaatgaaggaatccacattgaacctgatgcagaactggatctcgaaccgattcgaaatcttgacgggctggctgatattaacattgaacagtacgaagaagacaaagaatttgaaagagaaggtgatgaattcatcgaatcttttgatgttgtcaacggacgcggttcaccgtttgcaagtctgccataaatacgttatatgggtataggcggaagtctatacccacaacccatacaggaaaataaaaatgtttggctactggtataatagttctctgcgtaattatatcgtcctgatgggggcgctttttaatcacgttcaggttaaaagagtacgcggcgatcaagaaaaatacataaaggttccgatcacctatgcatcgaaagagaagtttctcgcttccatgaacaaactcaactacacgttgagtcaggaaaacgttgcaaagaccgaaaccattttaccgcgcatgaacttatcactggtggatctgcaatataacgcaatccgtaaaaccagtatcgcggtcaaccaaaaaatgacacagttagcaaccccacgaaaaacgatcacacagtttaaccctgtgccgtatcgtcttattttcgaactgggtgtgtatacgcgatatgaagatgatatgttccagatcgcagaacagattttgccatattttcaaccgcatttcaactgtaagattaccgaactgcataagaacgatatcacagttgaccgagacatcaaaatcagtctccaatcggttgcgccggataccacattcgagggcgatgcaaatcaacgccgtcatgttgagtggtcatttatgtttgaattacagggttatctgtacccgcctgtaactgatgttaaaggcgaaatcagaaccgtttacacggatttcttcgctaacatgaacccgttagataaagataactttgaatccgtggatagtcaagccgatccggtagatctgcctatgcaggactacacgggcgaagaatatattcagacgtactcgcacgataagccgatcccgtctggtgatgaacctcctaagccgagggaatgagaatggatgaaaaattagatttgcagcaattgctgaatattgattccctccctggcggcgttgagtctggggaggatgtggttgtttacgaaaaacttgaactggttgacgttcaatcacatccagcagaccggaaaccggatctggaagaggattatacgctcgcgcgtaagactgcgcaccatatgaatcagatgatcatggatatggcgcagatcgcattacacaacgcgaagaactccgaatcgcctcgccacgtcgaggtattcacaagcctgatgaatcagttaaacgtttcaaacattggcctgatgaagattcacaaagaaatgcgtgagattacggaagagactacaaaaccaggtgctgaaaagggcggtggtggtagtgaaatgaatatcgagaatgcaaccgtatttgttggttcccctacggaactgatgcagaaatacggcagtgcatatgaacccaaagagggcttcattaatggtgaagctgtagaggtaaaccctgatggaaatggaaccgacgatcgatccgagtaaggaatcagatcaccctatcggattaatgcatcccaaatatctgaaaaagaaaattgatgaattggggatggagtggacacaaagcgaacacgataaaaaatggtatccgacaacgttcagtgactacctgaaaattaacggcattcaaaaggtcgatattcagtctaaggacagttcgaactttgccacgtacaaaaataaaggcaacaagaaaacccgatataacggcaacccaaacctgaaacgtgcgtatatccagactaaatggacgcaacaaatgttgatggagtgggtgaaatgtcgtgatgatatcgtttattttgctgaaacatattgtgcgatcacccacattgactatggtacaatcaaggttcagttgcgtgactatcagcgcgaaatgctgatcgaaatgcacaaaaaccgtatggttgcctgtaacctgtcgcgtcagttgggtaaaacaaccgttgttgcaatcttcctggctcacttcgtgtgtttcaacgaagataaatatgttggtgtgctggctcacaaagcctcgatgtctgcggaagttctggatcgtaccaaacaggcgatcgaactactgcccgacttcttgcagcctggtattgttgaatggaacaaaggttctattgaacttgacaacaaatgtaaaattggtgcgtttgcatcttctcccgatgcggtgcgtggtaactccttcgcgatgatctacatcgacgaatgcgcgtttatcccgaactttgttgatgcgtggttagcgattcaaccagtaatctcttctggtcgtaaatcgaaaatccttatcacaacgacacctaacgggcttaaccacttctatgatatctggaacgctgctatagaaggaaaatccggtttcgtgccttacacggcgatctggacatcggttaaagagcgattgtatacagacggcgacaacggtacatttgatgacggttattcgtggtctgcgaagatgatcgctggctccagcaaagaggcattcttgcaggaacactgcgcggaattcatgggaaccagtggaaccctgatcgctggttggaagttgtcaaaactcacatggattgatattgatgaaacggaaacgaacttctatcagtataaacgtccagtagaggggcataaatatgttgcggtacttgatccagcggaaggtcgcggacaggattaccatgcaatgcatatcatcgacattacgacgatgccatttgaacaggttgcggtgtatcactcaaacaaaacgtcgcatcttattttgccggatatcctgttacgttatctgaatatgtataacgaggcatggatttacattgagctaaatagcacagggcattcagttgccaaatctctgttttccgaactggaatatgagaatgttatttgtgacagctacaacgatctgggtatgaaacagactaagcgatcaaaagctatgggatgttcgacgctgaaagacctgatcgagaaagataaattgatcataaataacaaaaagacaatactcgaatttcgtactttctcagaaaaaggcgtttcgtgggctgcggaagaaggatatcacgatgacctcgttatgtcgcttgcttgtttcggttggcttacaactcaaatgaaatttgccgaattctgcgagaaagacgatttaagactagccaatgaagtttttgcacgggaacgcgaacagctatacgaagacgcattatgtccggttatcgttacaagcggtgatgaaacgatttcggttggttctcacggtatttcgtttatataaattagaggaaattctataatggctttacaatctccaggtattgaaaccaaagaaacatcggtacaatctaccgttgttcgaaattcaactggtcgcgctgccattgtcggtaaattttcatgggggccagcttatcagatccgtcagatttctaacgaagtcgaaatggtaaactattttggttccccagacaacttgaccgctgactatttcatgagtgctgttaacttcttgcagtacggtaatgatctccgtgtggttcgcgttgtcgataaagatgccgctaaaaacgcaagcgcaattttcaaccagatcaaaacaactatcgcatcacagggttctaactacactgtaaacgatgtgattaaagtaaaatacaacaacgttgttgtagaagaaaacggtaaagtgtccaaagttgacagtaacggcaagatcctcgcggtaatcatcccaagcgaaaaaatcgttgcccgtgctaaacagattggtacttacccagatatttctactggctggactaccgaaattgtttctcagtcttccggtgtttccgcgtctattacgattgacggcatcgaaagcgattcagggatcactctgttgaacctggatattgcaaaagaaacaattcagggaaccgcattccagactcttacccagaaatatcagatcccgtctgtcgtggctctgtatcctggtgaactgggttcaactgttcaggtggagattatctccaaagctgcttacgattctggcgctatgatttcaggctacccttctggggtttccgttaagaatagcggtcgttctgtaatgacctacgggccacagaccgacaaccagtacgcttttgttgtgcgtcgtggtggcattgtacaggaatccttcatcgtgtcaactgagaagaccgataaagatatctacggcgtaaacatcttcatggatgactttttcgctaacggtggctctcagtacgtttacggtacttccctgaactggcctaaaggcttctccggtatccttgagttcggcggtggtttgtcctcaaacgacactgtaggcgctgatgaactgatgactggttgggatatgttcgctgatcgtgaagcgctgcatgtacctctgctgattgctggtgcgtgtgctggtgaaactgtagagatcatgtctaccgtccagaaacacgttatctctatcggtgatgaacgtcaggattgtactgtgtttgtgtcgcctccgcgctcacttctggtgaatatcccgctggcaactgcggttgataacatgattgaatggcgtactggctataaactcagtggtggtgctgttgttgataacaacctgaacgtaagttcaagctatggcttcatggatggtaactataaatatcagtatgataaatacaatgacgtgaaccgttgggttccgctggcaggtgatatcgctggcctgtgtgtttacactgatagcgttgctcaaccgtggatgtctccagcaggttacaaccgtggtcagatccgcaactgtatcaaactggctatcgaaccgcgcacagcacatcgtgacgcaatgtatcaggttcagattaacccggtaactggtttcgcgggtggttccggcttcgttctgttcggtgataaaacactgactaacgtaccgagtccatttgaccgtatcaacgttcgtcgcttgttcaacatgatcaagaaagacatcggtgataacgcgaaatacaaactgtttgaaaacaacgacgatttcacccgttcttcgttccgtatggatacaggtcagtacatgactaatattcgtgcgctgggtggttgctacgattaccgtgtaatctgtgacaccacgaacaacacgccggacgtaatcgaccgtaacgagtttgtagcaacgatctacgtgaaaccgcctcgttctatcaactacatcactctgaacttcgtagcaacgtctacgggcgcagatttcgatgaactggtaggaccgcaagccgtataacgtcaagggggctgaaaagcccccataaataatccgaggttaaaaaatgcttactgacattttacgcgcctttgaatccggtgatttcgcacgtccgaacctgttcgaagtagagatcccgtatctgggcaaaaactttaaattcacgtgtaaagcggcaaccatgccagcggctacagttgaaaaagttccggtaggataccaaaaccgcaaaatcaacgttgctggtgaccgtacctatgatgactggacaatcacgatctataacgatgacgcgcataatacgcgtgacgctctggtagcatggtcaaacatgatgcacggaatgggcgatcagattagtggtgatattccagcgaactacaaaaaaaccgctacggtgaaacagaaaaaccgtaacgatgaaattaccgccgaacataccatccacggtcttttccctactaacgtaggcgaagttaccctggactgggacagcaacaacgaagtgtcaacatttgaggttactttcgcgctggactggtgggaataaaggctataaatacaggggtagcaatacccctatcattatttttcggagttactatgaactttttgggctttggcaatgtacttagctttttcaagaacttcgcccgtgaggacgaattggatcttgaacagcaattaaaaaatgatacaggttcggtcgcgcctcctaaaaataatgatggtgcttatgaaatcgaaactgatctgactaatcagaaatacgcaagcgtattccagcagttttattctggacaagatccggcgattcagaacaaagaacaattaatcaatacatatcgcggcatcatgtcttacccagaagtagaaaacgctgtttctgaaattattgacgatgcgatcgtgaatgaacagggcaaagatatcattactttggatcttgccaaaacagattttagtaaggcgatccaggacaaaatcgtagaagaatttgataacgttctaaatatctatgattttgataacatgggtgcgcgtctgttccgtgattggtatgtggattcccgtatctacttccataaaatcatgcataaagacgaaagcaaaggtatccgcgaactgcgtcaacttgatccgcgttcgatggaactgatccgcgaatctatcactgaaacccttgatggtggcgtgaaagtattccgaggttatcgcgaatttttcgtgtatagcgctcctaaaaatggctatacatacaacgggcagatctaccagcataaccagaaggttaaaatcccgcgctccgctatcgtgtatgcgcattctggtctggaagattgcagtaacaacattatcggatatctgcaccgcgcagtcaagccagcaaaccaattgcgtttactggaagatgcgatggtcatctaccgtatcacccgcgcacctgaacgccgtgtgttctacatcgatgtaggtcagatgggtggcaacaaagcgacacagtacgtaaataacatcgcacaggggcttaaaaaccgcgttgtgtacgatgctaaaacgggtactgttaagaaccagcaaaacaacctgtcaatgacagaagattactggttaatgcgtcgtgacggtaaagctatcaccgaagtagacacgcttccaggcggtgcgaacttctctgatatggatgatatcaaatggtttaaccgtaagctctatgaagcactgcgtgtgccattaagccgtatgcctcgcgatgatgggggtatgcaaattggtggtggtggcgaaatcacccgtgatgaactgaaattcagtaagtttatccgcacactgcaaattcagttcagccctgtgctttccgatccgttaaaaactaacctgatcgcgaaaaaaatcatcacagaggaagaatgggaagaaaacgttagcaaaatttccttcattttccagcaagattcatattacgcggaagtgaaagatattgagattatggaacgtcgcctaacgttgatgtcacaggttgaaggtgtagttgggaaatatgtctcccataaatacatcatgaaagagattcttcgaatgtctgatgaagacattgacgaacaagcgaagctgatcgaagaagaatccaaagaagaacggttcaaaaatcccgaagaggaagaggaaaacttttgatgaaagaatttatcgaagcaatcaaaagcggtgatctggtggaagcgaagaagcaattctattccatcatggaagaccgtaccgaagcccttcgccaagaaatgcgcgttgaactcgcggaagctgtacgcatcgaaggtgaaaccgacgatgacgacagcgatgacgatgacgacgacaaaggcggcgatgataaaggcgacgacaaagacaaaaagccgtctgataaaaaagacgacgataaagacgaataagaggtgtaaataatgcaactcgaactcgaagaaatcagcgtcgaagatctcgaaccccatttaaccgaagcgaaagcccgtgttgatgttctggggatcgatgacggcactgtgaagatcatcgaaaatttggcggtcaatgaacctcatttagccctggctatgatgtccattgtcgagggtttgagtttagatgaagtcattgttaaacacgtagattcgcgcggtaatgtggaacgtaaaaaagaccgtaaaacccgtgaacgtaatgcgtaccaaacaactggtttaactaaatctcaacgtcgccaaattgcgcgtcgtgcgctaaaaacaaaacgtgcaaacccttctattacaacccgcgcacagcgtaagcgtaaaaaagcgctccgtaaacgcgccgcattagggctataaatatgaatgaatcccaactcaatgaaaacggcgatatgctgctaatcgaggaatggggtttaccttgtgcggatatttccgattcgattttagaatcggtcggtgagtcgaaaaaagacggtaaacttcggattgaaggtattttcctccaggccgaaaaagttaaccgcaataagcgactgtatccgaaaaaagtattagaagaagcagtaaacgattatatcagaactcaggttaatacccgtcaagctctgggtgaaatgaatcacccgccgcgaccgaatgtcgatccgcgtaatgcttgcatcctaattgaaaaattatggtggaaaggtaatgacgtttggggtcgcgctgttgttgtcgaaggtgataacggtgatggggataaactcgcggcgttaattcgcgcaggttgggttccaggtgtttcttctcgcggactgggtaaactttccgattctggaaaaggttacggtatcgtacaagaagggtttaaattggcggtaggcgttgatgttgtttgggggccaagcgctccagatgcttacgttaagccgattaccgaatctcagtcaagcaaaacgcttgttgagaataatagtgctgatgatgacgctttcagaaaactctctgaacgtttgaaaagtctatataaataatatcatatcaaacaggaaacttagaaatgcttaaagaacaactgttggcagaagcccagaacctggataccccagttgagttagacagcattttcgaatcagttgaactttctgatgatgcgaaagcaaacttcaccactgtattcgaacaagctgtaaaagcaggtgctgcgaaactcgctgaaacccacatcgcccagatcgcggaacgctccgatgaactggttgaagcccaggttgccgaaaaagctggcgaaatcgaaaataaactgtacgaagatgcgaataaatacttcgaccacatcgcgcaggaatggctctctgaaaacaaagaagctgtgtcccgtgatatcaaggccgatctgttcgaatctctggtaatgggaatgaaagaactgttcgttgaacacaacgtagttatcccagaagcgcaggttgatgttgttgcagaactcgaagatgaactgaccgagaatcagcaggaagttaaacgcctgttcgaagctaatcaggctcaggctaaagagatcgccaacatgaaacgcgataccatcgtttcagaaaaaacaaaagatctgactgaatcgcaaattgaaaaggttcagaacctgatcgaaggtttggaatattccgacaagttcgaatccaaactgaccgcaatcgttgaaatggtagcgactaaagcggaaaaacaggttgaagagagtaccactactcagacaaccactaaagatgactttgttccggtgaatgaaaatacacctccagcagagaaatcgaagatcaataaatatgtacaagcggctaaagccctttcctaatcttataaggtaagaaacaatgtctaagaaaaacgaattgatggaaaaatggaacgatcttctggaatctcaggaaggtttaccggatatcgctaccaaatccaaaaaacaactggttgcagcaattctggaaactcaggaaaaggatgctgatactgatccagtatatcgcgacgaaaaaatcattgaatccttcggcggtttcctggcggaagcagagatcgcgggtgaccacggttacgacgcaaccaacattgcctctggtaaatccagcggtgcaatcaccaacatcggccctgctgtaatcggtatggttcgccgtgcgattcctaacctgatcgcattcgacatttgcggtgttcagcctatgactggccctactggtcaggtgttcgcactccgtgctgtatacggtaaagatcctctggctggcggtactcctgcaaacgttcgtgaagcattccatccgatgttcgctccagacaccatgtattctggtgaaggtgcaaacaccgcgtttgctgctatcgcaactggtgttgctatcgcttccggcgctatcgttaagcacgtattccaggaaactggtatcgcgtacttccagaacgtgacctccggcaacgtaaccgtaactggtgctgatgctgctgctctggatgctgctgtaatcgcagaaaacgagaaaggcactctggctgaaatttccgaaggtatggctaccagcgtagcagaactccaggaaaacttcaacggttccagcgctaacccgtggaacgaaatggctttccgtatcgacaaacaggttatcgaagctcgtagccgtcaactgaaagcacagtattccgttgaactggcacaggatcttcgtgctgtacacggtatggacgctgacgccgaactgtctgcaatcctggcaactgaaatcatgctggaaatcaaccgcgaaatcgttgacctgatcaactacaccgcgcagattggtaaaactggtttcacccagaccgtaggctctaaagctggtgcgtttgacttccaagatccagtagatattcgcggcgctcgttgggctggtgaaagctataaagctctgctgattcagatcgacaaagaagcgaacgaaatcgcgcgtcaaactggtcgtggtgctggtaacttcatcatcgcttcccgtaacgtggtttccgctctggctcgtatcgacagcggcatcactccggcaggtcagggtctccagaaaactctgaacgtagacaccactaaagcggtattcgctggtgtactgggtggcacttacaaagtgtacatcgaccagtacgctcgccaggattacttcaccgtgggctacaagggtgataacgaaatggatgctggtatctactacgctccatacgttgcgctgactccgctgcgtggttctgatcctaagaacttccagccagtaatgggcttcaaaactcgttacggtatcggtatcaacccgtttgcgaactctcgctctcaggctccggcagatcgtatcacctctggtatgatcagcaaagaaatgtgcggtaaaaacgcatacttccgccgcgtgtgggttaagggactttgatcctaagttgttgaaaaacaacgactttttaaagggaaccttcgggttccctttttgtttatataaatagtgaaaacatttgaggctatattatgaaacatatcatttataaaataacaaacaccatcaataacaaaatatatgttggtgctcactcaaccgaagatatcaacgattcatacatgggttccggtattgcaatcaaaaaagcgcaaaagaaatatggtatggaacatttcacaaaagaaatacttcatgtatttgacacccgtgaagaaatgtatgagaaggaaagggaaatagttgatattgaattcataaatcgaccagatacatataatgctggtattggtggtaaaggtgctccaatggcattgattggatggagtgatgaacaacgcaagctgatttctgaaaatacttcgaaagctatgcaagctccagaaatgcgcgaacgcctttcaaaaatcaaaacaggaaagaagcaatcggaagaatccaacaggaagcgttcagagactatcaaagctatgtataagggttctgcattcgacagaaccggatctaagctcacagacgcgcacaaggccaaaataagccgttctgtgtcgatagatggagttgtttatgcaagtggttctgatgctgctaaagcgttggggctttctcgatctggccttgattaccgtttaaagagtgacaaatttcctgaatggaaattcgttgcataaataaacaatatactccctataaattcaggaaccaaagaaatgagtgataaacactacacaattcacaagttgatgcgtcagtcttcgcttccgtctggtaaacgagaaaaagttatcaacgaagcaacaggcacgaccgacatcaacgtacagaacacgcgcccagaactggtttctttgactcgcgcggttaacaacctgatctatcatgaactggttgctgtacaagaaacagaactccctgttgcaacactgttcggtgttcgctatcgcaaccctaatggtgatatgactttctccagtgctgcaacctattcaggccgaatctctggacgtacagacatcgacgaaatcgatctgactaaagcctacgttaaaggtgatttgttcaagcatgacggcactgacgttgtttatgaggttatcgcaccgattaccctgaacactctggatactgacaaagacaccgcgatcatgaaagctgtgttccaaagcaaaattcgtctggtgagtgaagccgctgacacttctaagtatgaaaccagcgaagatatcgcgtcaacctccttccagatggatcgctggaatattccggtacgctcgcgtaagtttaaaaccgaaatgacggttgaactgatgcaggatttggaagcgaaccagttcgaagctgatggggtgatcgaagacatcctgggaaccgtggcaagtgaagaagtcaacaaagacattattcaaacactgatcaccgtttccaaacgttacaacgtcgatggactcgttacggatggtatttttgacggtactaccgcatacaccgcgaaggatgctccagcattgggtcgtatcctgtatcaattagcgtgtgaaatggggcaggaaatgaatagaacgacttcatttgatgctacctacgtcctcgcaacagcgcgtgttgtaggcattctggctgcgtctggttggatgcacgaaaccgacgaacaacacccactggcaacaggtaagctgaacaacggttattatgtctatacagacaccaacagcccgttcgattatatgctgactggttgcaaatatgatctgggtgatatggatcacgtaggctctctgttcttcgctccgtataccgaagctgatgaagcaggttcaatcaaagtatccgtagatccggcatccctgcaaccgaaagttgctattctgatgcgttacggtctttccgtgaacccatacacagcagaaagcgaatccgatcacctgatcaaaggtgatgattggtctgctcttgcaggtaaatctaagctgagtcagatcgtaggtattaagttacctaaactgggttaacaagttttgttttgagaagaccattatagtaataaagatctataaggtcaaacgagcgaagcgagttttcacgaacgaagtgagtgatgggtaagtacgatgtactgtttataatatttatattttatatatagagaaaacagtacatttccgtatactttttaaccaacattcactcactacgttcgttcatgtactcgcttcgctcgtagatttgacttcttgatctaactggttataatgttactttgttttgaggtgatacatggctgaactaaaacttgaagatctacaggctgaacttgaagaggatatgcgtattgatccgttgaagttacaaagcgaatcagcagacattccgaagatttggtcaaaatggcttcgataccattcgaatgctaagaaaaaacttattcaactccaggcgaagaaagaagcgattgtaaaagatcggttactgttctacactggtagacacgaaagcgaaatgaccgatgtcatttacactggttcgggtgaaatcaaaattgctatctccggtgatcctaagaccgttgaagttaacaagctgatccaatacttcgaactgattgcagagtttaccggaaaagcgctggatatcgttaagaacaaaggctactccatcaaaaacatgttggagatccgtaaacttgagagtggtgcataaaatggcagaagaatttgattgcaaatgcgttgtgtgcaaacaaccgatgaactcccgtaatacggcgtttgtcaatgaagctggcccgatctgcggtgtcgtatgtttgcaatatctcaacgaaaggaatgatcgcggtatcaatgaagccgacgatctgaacgaagttcaaatgttgctgtaggtgtgaatatgaaagactattcaaaaatcgactttaacgaagtatttcgtttgctgggattgatggaagaatgtgtgaccagggttcatgcacttcgaatttcgtttgaaagcggttgtatcgaagacgaacgcccagatttatagcagtaaatagatgtgtaccccttgtggggcttgggcttaccgtgtggcgtacccatttgcgccgtccgatagaatttactttcggcggggtgattggtaagataccttcgagtaaaggccagttaattgtaattcagaatagtacagcactgaaataaaataaatgtacgtgtcggaacaaacggtttccgaaattaaaaagccccttcctttcggttggggctttctttttaaaacttctcttcttctccggtttcaagttcggctttcagttcttctcgtcgtcccttgatcgcgtcacgcattgaaatgtcatcggatgctgcaacctcgacttctttcacgcgggtgttgtaatacttttcaagttctttcaaaccttctagtgtccggcacgaagcaaccttattcatgaaatcatcaatcgctgcttcgtttacgaatgtagtaaaacttttcattttggcctcttaaatttctacctgtttgatcgcgtagtcgaatcgttcttcattgtagatccgcacacgttccatagcatgtttcataccgtagtttgtcgcactgtatttatttttggctgtcttagactttgacagcgtagccaggttatcaacgatatcccatacagtagcgagcgctttcgatccgtgcttacgaagtacacgaccgatagactgtttcaccacaacagcagatttgcaagggtgcgcaaaaatgatgtggtgtaggttcttgattgagatacccgtactcagtaccccgatcgaaccgatgacgattaaacctttcgtcgattccgcgattttcttcatttcgttacgatcgtcaatgtctgtatcaccattgaccaacaccacgttatcgtaaaccttgctcaactgctcgtacagccattttccgtgctctttgtaccggaacatcacaaaggcgttttcgttcttctcacgggctaatttgagcgctaattttagaatccacgcgttgcgccgtgtgtggctggttacgtacttgatttccgtctggtagtccgcacccttcaattttttgacctcttcttctttgtatcgaaggaagatcgtgttaattttcaggttggtgacttgtccatcatccatcaaacgacgcgtatcaactggtttaaagactttgccgaacgcaccgatgtattgcatcatgttcgttttcccttctttcagggaaccggataaacccagtttgaagatacattgatccatcgtgtcgataatctttttgatgctcatgcctgttgagaggtggcattcatcaaccatcaaacacatgaactgttggaaccattcggcaggcattttaaccgctgattgccaggtagaaacgtaaatcagtgcattactgtttttcgctgtaccggaacggatacccagcattgccgatttcgggaacaaacgatagtttgcaatgtcctcgatcatttggtcaacaagtgcggtagtcggaacgatgatcaacaccttcccgctgtaatgttccagacaccaacgagagataagcccctgaatcagagatttacctgctgatgttggcaggttcagaacaccgcgacggttcttgataccgtggaacacggattcgcgttgataccagtacggatcgatctgtttgtcgccgtcataaaccggatgttcgctaacccacttgttaaaatcttcttgcgtgatatcctcggtttcgtggatctttggatcaacccagattgaatacccgcgtgattctgcgaatttggataccagataggctaacccatacgggagtttcccgttgtagtccatcaagtaaatgtaaccgttccatccaccatatttgtatttggcctgatactgatagcctgggggctggaagctgaaatagtcacgcagttcatagacaatgtttggttctgcctgaatctgtacgtggcttgtgtttaaaaatttgacttcaatatccactatgattaccctatgtacaaagtatatacgtatttatgtcataaatattggataaacacttggagataccaatgaacattgattacgaaaaagttgatgggttccgtaccctcgacgcaaaagaacagaaaggcgcgttagctgattacgcaatgactgtgtttgctgttaagctgaacaaacaaaaatccttcgataacatgctggcggatctggttgctgctttaccggaagatgaagaaaaaccggaactgctgatcgattcccctgaaccggaaatcgttgcatataaaggtgaggtgactatgggtgaacctgtcatcgaagccccgaacgttcccgatgtggttattgatgcttctgcggattttatggagtacgttaaagaggtcgcgccggaagtagccgatcaaatccaattagtacctgatgtcgtagaagctcctgtaagcgcttctgacgagtccaaaggcgaactggtatggttggaagggtttagcccgacaatcttcatgatggggcgctctgcgagttctaacgggtattatacctgtccgtggtggatctatgactggattaaacaaaccccagactggtacaaagatcctgatagctgtccacatgcaagcgcaatcgacacaatcaaatcacttgcgttctatatcgtgcgcgatggtgaagttcgtgttcgcgaaaccagaaatagccgattcgaaacatttaagttttagcactttttgctaaaaaaacttattgactcataccctcgtttaaagtatatttgtactcgaaggcgggggaatggctctcgcagtgaagaaggaaagcaaaatgaaaaacgaaatgatgaaaaacgcttattacccagttctgtttgtttgggctgatggtaaagtgaagaaagtagtcaattcaaatgctccttactatactgttgaagaagcactgcgccacgcttacgaagctgattatcctgtccctgctgaacctggttatgctcgttggaacggttcaaaatgggttgctgatacctgggacaactacgaagaagcaaaaatggaatgcgatcctgattatgtttctcgccaaatggaagcgcacatgattgcagaccgtcgcctggataacgaagctcgcggtttctattaaaattcaaagggggctacgcccccttttttgtaggtaaaatatgactgaattaaatcacgaatgcctgaaagacttatcagaaggtaaagagatcggaaacgtcatcttccttgatatcgacggcgttctaaataatatgcggtgcatgaaatttggtgagcatatggacattgaatgtgctcgacacctgcgccggatcgtaaatcatgcgaactgtgatattgtcatttcctctacatggaggatcggcaacacaacccatactctacgggaaatcttctacccgtggggattgtatcgcatcattgggaaaacctgtacgaatctaacagaccgacaagcaggacgcggtgatgaaatcaaagcatggatcgacaccttcggatgtaagaattaccttatccttgatgacgataccgatatgctgccggaacagagtgaacatttcatcaataccgatgggttcgtagggctgacagaagaacaatccacttacgcgatccgtaatgtgttcggtgtaacaaacccgttctgtcctgaatgcaacggctatgggcgcgtgaaccaatatgataaatgtccgtcttgtgacggcaaaattttacttctctaaatagagaaaaactaagaggttttgaaaatggctacagaaaaatggactacggtacacccgatcccgtggcgtaacaccagctttacctatctgccgtggtggatctttgatatcatcgtggctgcgaatgctgcaagcgaagactggcgtgattatgccgaagaaaaatacgcgaaagaattcgacacactgaaacaggcgtatattgattacaccgatgttgatttcatcgaatcccgtaacggttatctgtataagctgagtgattttactcctgctgatcctgtcgtaacaattacaccaaaaaccgctcctgctgatttcaaagtaggtgatgcggatctggctgcaactgatctgtttaccatcgatccttctggtacagaaatgactctgagtgttgactcttccggtcatggttctatcgttggtggtaaacttcatgcggttagtgaaggtgatgttgtcgtaacagcaacctctggatctgttactgcaactctgacggtaaacgttaaacctgcaccataataacaactaagaaggtaaaaatgctactatttgaattcaatgatgtattcgcaaaattcagcgacgcaatcgaagccaaatttggcaaacgcccacaaaacatgacagatgcagaatatgaagctgctgtatcgtccctggttcgtacagatttctatgaaaaactggcgatcgaggtgttgggttgggatatgatgaaatggggcatgacctatcgcgatcgcgaagtcggttttattctcgtcaacgaagcaaaaagcccgtcctgggtgaatagtcaaaaaatcgcgtacatggataaagtatgcgcacagatgggtattgtacgtttagacttctggacttgtcgggatctgaacgaactgaaagcccacgcttaccgttgccctctgatctcccgcaatgataagcatcgtcaagcatgggatagcgcagggaaatatcgtagtgttttcctgaacgacgatatgaacatcactattcaggatgttaaccgctcctttgcggattacacaccataaacaaaaaagggaaccgcaatggttccctttcttttatgcaatttttctgatttctttcaatgcttcttctttgctaccaacgaagagaatcgctttacctccggcttttctgaatggcaacacagcttttgccctgtcatcaatcagtatacctttgtccgcatatgctgctttctctccgctgcttttggtgtagtggaattcaggcagataaccgaacaccttcatcaacgcttttcttttttgttctgctaccgcatcggaattgtatttccctacgctggttaagatcgcaacctgacctaaagttctcaaatgacagaacaggtcgatgccctcttgtaatggttccagattttcgtagaagtcagtttgtgatatagcctgtttcgcttttttcaattcttcttccggcattctcgccgggtcaccgtacatcggaacaaaagaaccttcccagttgaacagtacaccatccatatcgaacaaaaactttttcatatcaattcctcggtttgtgtgtgcatcatattcatatatgttcctattgtcaaccccatgtatcagttttcggtgcgtatgctgcaactttcgccactaactctttatcaagctgatcaatggatttctgcggctttccttttgccttaactttgatgtagttagacttaacgacaaacataccgcctttgtcagatttcttgatttcgctgtcaatgcctactttgttgaagctgatccagatatcgccgtccatgtactgtttcagagagtcgcccatattcaggatcttcgccatagtgagcgctgccccttcgtgggtatccatgaggatttctttaggcactacacgatcgcgtttaaggttctgctgcatagcaatatgaacatcgttcataacccaaacgatatggatattttctttctgataacccagcgtttcaacatcacgggcgatacttgccagcttgctcatgctttttagggttacgtcaaagatcagatttggtttacggtcttccggtgctgctgcgatacccgcgtacacacgcgcctggtttttgttggatacgttgaacacgtccgcgatcacatgatgcagtgttgctacgttgtctgggtttttcaggttcatggttttgacatcgtgaccagttttcgctttgatctctgctgccagtttggtactacccatgaccaattttttgagtgcgtcaacgtccagtgtgataccttcgatgcctaacagcttttcgagggtgaaccctttaccagaacccgcaccgccagccaggatgactacctgaccaaatttaggataagccttaccgccgaaggtgatcagcgcttcatcaaggctcgtaaagtctttgaatgatttcatcttagaactccaggtgtttatttaaaagtatttattgacacggtttatgagtgcgtttatagtgcaattgttcgacggataagccggaagaactttaaccataaggtaacaattatgaaaaatgaactgcatgaattcatcaacgccgctgttcttggcgaccagtcaaaatataaagcccgtcgcgataccctgattgacgatttctgtaatttcctggggttcaagcgctggcataccccgtctatgcgtccagattgtgatccaaaatgggattacttcaaatggagtgatcgcgatcgtggttacgtcgataacgtccgcgtaatgtctttcaaccacttatacgcaaattcaacaattgctgttgctaaacgcaacgattcgacttatccgaacgggtggagtgttgctaaagtcatagaaacacttcttcaactgcgtcgcgaatataaatcagcataccgtgtcaatcccaatcctatctataatgaatggcaaatcgtcgcgaaatacctgctgaacatcacctattctattttctgtcgcttcgggacaaaagagattggatttggctctcatgatataattgcagaagcacgtcaccgcatgatccatgcaatcctgaaaattcaaaactctggtgggcttgttcttgctgcgttctgtgatgaaattgtttactacggagaacaggtcgaagttgatgatgttcaccacgaaaaattcaaaagatttgtattcgggcaatataacagctattcatatggaaacgatattcgtgtgatgaggcacccgcgcattatgttggatatggaagggtgggaaccaggtcacggaattggtgatgccgaaagccaacgtgaacgccgtgttcgttcagttgctaaaactcgcgaattgatgacaggtagccttactgattacctgttcagaacaaaagaagacgttgaaaaagaatttgttgacttgtcgggcgaatagcgataagctgtaatctctgaaaacaaggagataaccatgaataccattcactgccgcaaagagttcgttgagttctatcacggatcatgtactgctgccggaatcgaaagcatgttgttgcctccttgtgattctgatattctgtctgaaaaaggcagaaagaaaaatctggatcgtgttttcttcactgctgatatcgggctggctcgtatctatgctggaagggctgcacgttcaataggtggtgatccggtactttatcgggttgtgtgtccggtagatgtggtatgcatgaacgatgacaaaggcgcaagcgtttatcatgctgcatgggctttctgtgaggaattatgaaagataaggtgttagcgtatctcgttttcttgctgggatatcgcgttgaagtgatgggtggttattcttctttgtatggggatttaaccgcgatctggatggttgcgttgggggttatgtttacctttatggcgatctgtattgcgaatgaggctgatcaaaatgcttgaattttatcctgctggttgcaagtcaaatccgcctgatgcatcgttccaatcgtggatttattttcacagggaactaaacgacatcatcgaaagtcagtggaaagaccatcctgaacgaagtgcccccgatttagtcgatagcgtaacagatgtacgcaccctggaaaaagggctgtatgattgtctggttcagggaatggtgtgtaaattgattttgtggtatgctccgatcggttcagatctaactcgcaaaatcgcccgtggctatatcatgacgaaacgtgagtttgaccagatctggaacgaacccgactgtttcgaacgcgaaaaatacgaaaatgaggttagttgtatatgaaactatttcatgttgtatatggtggaatgaaaaacatcgacatcgccgcgttatctgctgggatgctggacgaactcgaagcacagatcgggaaacgattcaaagccagtatcaccgaaacgcaaactttgtttgtcgatcaccctgcggatatggaaaaccttgtcaacactctggatgatctgatgatcccgtgtgctgatggttggaacgaagcatccggtgttcatgtagttgtaacttttgttcttaaaaatgttgacagcagaaatgccgaagtgttagagtttattcgtaaaattgattctactaaaggaaagtaactatgaaaatcgttcagcgtaatatcagcgaagttagccagcaggaaaaagtacagattcatttcaaattcaatgatctgaaactgggctatgcacagatcgcccgtgagcacatgctcgataacggcgacatttacgtgattgttcaagaaattgagcgaattcgtgctttccgcgcagaaaatccaaaagtgaaacatgttctgcgtcgtgtgtacatcaataaacatcgtgaagaacagcgcaagcctaaactcaaagctaaacgcgatccgcgtccagataacaaacgtaaagcaatcaacggcgctatggcgctggcgttccaggaagcgggtttggcgtaaggggtttatatgtcttcaatgatgaatcgctggtcgggcgtgataacttcgactatcaaaaaggatttggtgaaggttgaagcaaaaccaaagccagtagaaccggaaaaagttcaaactatggtatcactcgatcctgctgagttagaacaccgccgccgtgcaaagcaaattgaattcgatctgcgtgtcgctcgttcatacaacagtaaaaacgatgatgcgcgtaaccgcaaccttcaatttgctctgacgttaagcgactgggcgaagctaatgagtgaacccgtatgttcttactccggcagaccgtttagcaacaaaggcggttgctctgactcccgaacaatggaacgaatcaacgcttctctgggatacacggttgaaaacacgatcgcagtaaccagcgccgcgaatagcgagaaatcaaatctcgatgcgtttatgaagggttctgtgatccttccagaagtaaaactgaaactgttacgcaaagctgcgtatcaaattgaaaaacaactgaaaatcaagggttaattatgtttgtgaaatattcttctctgactaaccattatgaaggtaaattcatcaatggtgtgatcatgaatggtttgactggtggcgtgtgggtagcgcgtgaaaagatccacggggctaactttagcctgatcacttcggacggtatcaaagtcattccggcaaaacgtagcggtgaaattctccctgctgaacagttctacggttgcgaacccgtagttgcgaaatactccgaacctgttcgtaagatgtgggaaatgatctctactgcgcgtcagttaagcggtgagtatagcgatgaactggtgatccaggtatacggcgaattcgcggggcgtggtgtccagaaagatgttgactacggcgaaaaagatttctacgtatttgatatccgtgttaatggcgaattcctccctgataacgttgttgcaaattacgctgttgctgttggcctgaaaatggctccactgctggcatacggtacgtttgacgagatccgcacactgcctatcacctttgattcggtggttaacctggcgaactccggtgcgatccctgcaaagaacggtgttgaacctgagttcaaaaacttcatgacgctgaaagatggtgaaggtgagaacatcgcagaaggtttcgtgatgaagcctgttcaacccgctttcatgccgaacggtgaacgcgttgcaatcaaatgcaaaacgacgaagttcacagagaagaagaacaagcaagcgaaccgcttcgatgctccttctgaactgtcagaaacagacaaagtgaagctgaacgaattcacctgctacctgactgaaaaccgcgtgaaaaacgttctgtccaaaattgacagcgcgaatctcaccgctaaagatttcggtcgcgtgatggggcttacggtacaggacgcgctagaagaaatcgaacgtaactacgggcctttcctggaacagttcgaaaatccaacgctggcgaagaaaaccttcactaacgaagcgtcaaatctggttcgtgagaactggggcgcaatcctgaacaatgaattttaaaactgttctcgaaaacgcaaaaacggctaccctgatcggtagccgtgaaccccctgaacgtatcgcgagcatagccataaagattggacgtgctttaagtgatcgggggatcttcgcttactctggtggtgctcctggaatggatagccatttcatgtttgactactcaccagaaagacggcgtataatcctccctgagaacggttttaacgggttgtattctaatggtaaggatatcatcgactatacagaatacgacacgtacaaagccgctgacgaagcgagaaaggtagctggacacttcgacaaccaaagcgaatggacacaacgccgatacgctcgcaattcaatgcaggtattaaccgaaaacctggacaaacctacagattttgttctattctgggcggtagagaaagatttttgtgttaaaggtggtactgcgatcgctgcaaggcttgccagattgtataaagttccaacgttcaacctttggaatcaaaacgttctggatgaagtctgcgatactttagggattaacactaaacctcctactctggattttctctggtgataactcccgaacaatcacgtaattacgaacgcctctctgttgaagaggcattaaaaaaggcgaaacataatggtagaaatcaatggaatcggtgtgaacgtacaggcgggaagcgggacatcgtgggtcaaacgcgaaacacaagatgatccccgctgtggacgtagcccgacactggcggaacgtgcgcgtaaactggttgatgaaatcaacgcgaaaatggtcgaagcatcccgtaaagacatttccgagtatgtcctgaaatatccgactaaacaagcatatacctttgatatgaaacgttttatcggtaaggttatggatcaggaatgtaccgaaaaagcatatgcggatctgggtgaatggctggcggaagaagggtttactttcgatacccagcgcaaccgacaagctgcgttactcaataccttcgcgggttcgcgtcgtattaccaactttagcgatcctaagcgtgacggatatagcgatctgacttattacatcacctggtgaaaataattcgaaaaacttgttgacgggagttatgagtgtggtaatatagctcccgtagacaagacactaacctaaaaggaaaacatcatggaaatcaaattagtacctacttgcgctggctactgcttggcactgaatggtgtagcacacaacggtaaaggcttacgggctaacgttgaagcaatgctgaacgaactgggtgcggtttatgaatatgatgacgttgcaaccagcgttaaaatcataagccttgaaaaagatggtgttaactgtgcgggtttggtgggattgctacatcgactatagcgacaaccgggtcttcttactgaccagcaaataaggatcgaacatgagtgaagcagaatatattgatagctggggtggctatgacgatgacgacgatgatttttgtggtcataatttacgtcgagaaactctaaggcttttgcaacaagcaaatgcgccgaagcaagtcaaaactcctgttaaatattccgatggttcgattcgaactgaaacggttgtcaaagaagtaaacgggcgtgtcattacgtccgagcggcagaaggacatcaaacaattgtacgatgttgcaaaagccgctaaagtaggaaccatgatcacctgtcctacgtgcaaagagttgcacaagaagacgacatatcataaggtgttctgctctaatggtaaaaaatccaggaaagactgtaagagtaaatactggaacacgatccatccagaacgtttggatcgtatcttttaaatcaaaacgtggagtacgtttaaatgaaaacttttaatgaactgaatagcctgatcacctcaactgattcctacaaagtgtcccactggttgcagtatccacaaggcactgatgcagcgatgttctatattgaatctcgcggtggtaagtttgatgaagtagtaaccgctggcgttaacttcgttgcgcgggttcttgctgaaccaattaccatgaaacaagttgagttggcacgggtactttaccgtaagcactttgggaaagagattttcaactacgaagggtggaagaagatcgcagaactgggttatgtccctgttactttccgtgcgatcccagaaggtacggttgttccggttaaaaatgccgttgcgactgtgtacgccgaacatgaattctcatggttggctgggtggctggagacaatgacgattcgcggtatctggtatccgtcatctgtagcaacgctatcgcgtgagtgtaaaaaggttctggctcattaccttgatatgacttctgacctgactggtgaagcatataacatcacactgggtacacgtctgcatgatttcggggcgcgtggcgcgacctctgctgaatctgcgggtattggtgggctggcacacctctataacttcatcgggactgataccgttgaaggtatgattatggcaatcagtctgtttgctgactatcaaactctgtttgatgaagttgaaaacgtcgaagcaatcggtgtttcaattccggctcgcgaacattcgactacgatttcctacggtaaagagaacgaagacgaagcatacaaaaacagcatcgaaatgttcggtacagggttctacgcttgtgtgtacgattcctgggactacaaaggcgctgtagatcgcatcgctgaatataaagagcaaatcattgctgcgggtggtactctggttgttcgtcctgattccggtgatatgattgataacatcatgtacaccctgcgtaaactgggcgaaatcttcggttacaccgtaaacagcaaaggttacaaagttctgcataattcagttcgaatcatccagggcgacgagatccacggacctgaaacaatcaaccgtgtgttaagttggatggaagcgaacaagtgggcgagtgagaacatcgcgttcggtatgggtggcggtttgctgcaagaagttacccgcgacactcaaaagtatgctgaaaaactgtgcgctatccgcgtgaatggtgtgtggaaaggcgtttacaaatgcccgaaaggttccgaatggaaacagagtaagaaaggtttgctgatgaccatcactaacggtgtggaattcaaaacaatcgacactctggaaactgagattcctgacgggtggcgtgatgcgatgattacgtattacgacaacggtgtattaaacacctccgatacagtaggggttatccgtgagcgagcaaggatttaatatccgcgccaacgataacggatcggtagtcttctacaacaatcagccccttgtcgctcgcaaggggcttttttgtaagttggtgggctacgggttcaagttggaacaggtggacaacgcgacactaaaagaggttgttcgaattgcttatctactgaaagataaaaaagatgaacaccgtgctattgcaatgcttgagaaactaggcgaaaattattgcttcgtggtgaatcgtgggtataagtacgaaacgatcgccttatttgagaaaggacttggtgaattatgattaccacaattaaagaaggggttgacctccatttaggcgactccgtaaagctgattaaacagcttgaatctggttctgttgacttgaccataacttcgcctccgtatgacaacttgcgccattataacggctctggtgatgtctggggtgaacacgtatggaaagagttgatatcggaactgtaccgcgttaccgcgcctggtggtgtggttgtgtgggttgtgggtgacgcgactatcaacggtagtgaaacgggtacatctttccgtcaagccttgtacgcgatcgaacaaggttttcggttgcatgatacgatgatctatcacaaaaccgctctaccgaagaaccataaccgatacgaacaggactttgaatacatgttcgtgtggacaaaaggcgcaccaaaaacattcaacccaatccgcattccgtgtaagttccctgaaaaggaaaccgcacgacaaaacagctacttttccgaaaccaacgaaaagaaccgttcagcccgttccggtaagaaacgtaaacctgttggcaaggataaaattaagggtaatatctggtattacgctgtagggcgcaatcactcaacgaaggacgagattgcattcaaacacccagcaatatttcctgaacaactggcagaagatcacattaaaacgtggacggttgaaggggacttggttcttgatattttctctggttctggtacagttatgaaaatgtcgatactaaccaacagacggttcaaaggcttcgaactgatggagaattattatcacgattctattcttcgtgttcagccatacgttaacaatctggaatcttttctatgagttatttgggtgttatcccgtatacaggtaacaaacaatcgctattgcctgaactcttcaagctgttccccgaaagaagttcatacatgcgtttcattgattgtttttgcggtggccttagtgtgtcgttaaacgtccctaaacccgttctaagcaacgattacgataagacgctgattgatatgtatgagcgtcttaaaacgcttcctgacctgtctccggtgcgagaattgattgcatcaaaggggctggggaaagacaagaaagaagagtatttgaaattccgtgatgaatacaaccagaacaaagatccgttatggctctatgtcctgatcctgcattcattcagcaacgttaaccggacaaacgacaaaggcgacttcaacgctaatttcggatgccggacgctcaacgatgcaacagtaaaacgctttgaacatttcaaaaagaatgtgaaaggcattgagttttccagtggttcattccgtgacattgatatctgtgaaaatgatttcgtgtactgtgatcctccgtacctgatcaccgatgcagtgtataacaagttctggaacgaagatcgcgaacgtgagttatatgctttcctggatgaactgcacagcgaaggaatcatgttcggactgtccaacgtgactcaccatgccggaaaacaaaatgatatcctgattgaatggatgcagaaataccgcgttcataatctggataaaaagtatctgttaggccagcataccgactcttacgagcaaaacaaaacgcaagaagtctacgtgtgcaactaccagaaacgcgacgtaaatacattccctttaacactgaacgatttaatgtaggttaacatgtttaaaatttatggctatatcccttctgtgtataactgcgctccatgcctgaactcaaagcgcttgctggacgcgaaaaaacatccgtatgagttcgtgtctgttgcggattccgtggaagacggtaaacctgtactgaacgaagcggtgatcgatgaactcgaagcgcttgttggtacgcgccggatgaccatgcctcagattttccatgacgggaaacatgtaggcggattcgaccaacttcgtgagtacgtccgcaccctgtaataaataatgacaccttactgaatgttgttattatgctgacgaaacgaattaccaaaaaagactacccaactatcaagcaagctctctttgaaaaacaggggggctgttgtgctatctgtaaacgtcccctggagggcgagatcgagaaacatcaccttgaccatgaccatgctttagacggcgaaaacgccggacgtgtgcgcggcctactttgtaacctatgcaacggtacagaaggtattgtgaagcacaaattcaacagatccggtctggtgtcccgtgatgtcgattacatccagtggttagagaacttgcttgcatatctgaaacaagactattccgaaaaccgtattcatgacaaattcataccagataaggtaaaatggttttcaagacttaccaaacctgatatgattgccgaaatggtttctatgggcttcgagtacgccgacaaagacgaacgcaaagccttaaccgcgaaatatagaaagcaattaatgaaggcaacgaaatgaaagtagaaaaacgcgacggtaaaaacgtcgatttcgataaagaaaaaatccgtattgctgtagaaaaagctggcggtactatgacggatgctgatgccgcaatcatgctggttcagtacaatcagatccgcgatggtagcgcaatgaagatcgcccgtatccaggaactcgttgaagaatccctgatgaaaacgaacccagcggtcgcccgtgcatacatcgaatatcgccacgatcgcgatattgcccgtgaacagaaaagtaagctgttcaaagatatctccggcatggtgaatctgtccaacaaagagatcaccaacgagaacgcaaacaaagacgcacgggtattcccgacacagcgtgatttgctggcggggattgtagcgaagcatttcgcccgtaatcatatccttccgaaacatatcgtagaagcgcatgactccggcgacatccattatcacgatctggactatagcccgttcaccccttacactaactgctgtctggttgacctgaaaggtatgctggagaacggtttcaagatgggtaacgctgatattgaaccgcctaaatcgatcggtgttgctaccgctctcatggcgcagatcaccgcacagattgcctctcaccagtacggagggacaacctttgcgaacgtggataaagtgctggctccatacgtcgaaatgacattcttcaaacatctgcgcgatgctgaacattacggcatcgaacactataatgaatatgtgtatgcgattgaaaagactgaaaaagatgtgtatgatgcgttccagtcctatgagtatgaagtaaacaccctacatactgccaacggacaaaccccgtttgttaccatcactttcggtactggtacgagcgattatgaacgcatgatccagaaagcgattctgaaaaaccgtattcgcggcctgggtaaagagggtattactccggtattcccgaaactggttatgttcatggaaaaaggaattaaccttgatccagaggatcaaaactatgacatcaaacaacttgccctggaatgtgcttctaaacgcatgtacccagatatcattagttcagctaacaaccgtgttattactggttctagcgttcctgtatctcctatgggttgtcgcagtttccttagcgtgtggcatgatgataacggtaatgaaattcttgatggacgtaataacctgggtgtggtgacaatcaacctcccacgcatcgccattgaagcggaagcgcaggaagaagaagacgcacacgacgcattctggcgcatccttgatgaacgtctggaactgtgttttgaagccctgatgactcgtatcgaaagcctacgcggtgttaaagccagtgttgcgccgatcctatacacagaaggtgcttttggtgtccgactgaaaccggatgatgaaattctggaactgttcaaaaatgggcgtagctctatcagtctgggttatatcggactgcatgaaacgctgttgatgtttggttcaggccaacacccatttgatcgtatcggctcccagaaattaggccgattgatcattgaatatctccgcgctgcaaccgaagcatggaagaagaaaacagggtatggatttagtctgtattcaaccccagcggaatcgctatgccatcgcttctgtaagctggactttgagaagttcggaagcgtcaaaggtgtcacggataaaggctggtacacaaacagtttccatctggacgttgatcgcaaggtaacaccgttcgagaaaatcgactatgaagccgattatcattacatcgctactgctggtcatatcagttacgttgaattccctgatatgaaaaacaacctgcaagccctggaaaaagtctgggattatgcgatggaaaaactggactacttcggaactaaccttccggtcgataagtgttttgtatgtggctctgatgacgagttcacgcctacagaagacggtttccactgcaaacactgcggtaatcaagatccggctaaaatgagcgtcacacgccgtacatgcggttatctgggtgctcctgctgttcgtggattcaacgaaggtaagaacaaagaaatgatgcaccgaactaagcatcaaaattaatcaaaaagccccttgcgaaagtgaggggcttttgttatattgcacataccgaaactatgaggtattgaaaatgatgtactggacaaaagactattttgaatttcgcgatgaagaaagttttgggactgtataccgcaatttagctttgcgtggtagtcctctgtcgcctaatcaactttcatctgtcttgtttcctatcaaggtaacgcactgcgatcggaaaggtgtcaatgggattgttgatgccaatggcacaacatggtattccgaagattcttatctgtttgataacgaggatcgcggattctttaaaaagtttgtcgcgcttaaacctgctgttgaaaaagccgacgcgcaacaactgctggattgttctcacctgctggggcgaatttacgtagatggtaagctggtgacgaaacctggcgatctggaaaaattcttgcgtaaggcgcgggaaactaccctgaaagagaccgaaaaacgttacgatactgcaaccgccaatctacagcgtttgtctggtgaactgaaagttctacggggtgaatgatgaccgggataatccttgataccttgtttccctcccgtgtacgtaggcgcgtagaacgggaaaaccgactcgaagaaatccggttcaataagttccttgaggacaagaagaagcgcgaagacgagaaacacccaaacgcaaaaatggctgagggtgtatcgaaatgttctgtcgggcggttctgggttgaaaaggattatcttgacctgataggtgctattgcccctggtgttacgctggaggacttctcccgcgctactgggcgttcgtatactggttgtatcaaccgcttgcgtatgctctctatagtggtgcgtagtgcgcatttcggctatcgtgacgttatccgtccggtgatcccagtaagcagattaaaattttatatggcgggtggaaaaagacttgacttgaccaacgaactgtgtaaaatcggttatatcagagaggggaaagttgttaaagcccctgaatggttcaccaatcaatttgaaatcaaataaggtaaaattatgttcaagaaaatcgtagcattcgtgactggtaaagttgaaactgcaattgaacaaaacacttccccagaagaagcctggcgcagtgctgcacgtatcctgatcaaagagatcgaccgtctgcaacatactcgcgtttctgctgttcaggaaatcgtgaagttgaaaaagaaagtcaaagaacacaaagatcttcattctggtaaagagtcggagatcaaaaaactgctggcggcggggcaggaagtgtccaacagtcattatgttctggcgctgcaacaccgtaacatctggcagggcttgcagacgaagatcgaagaactggaagggatgaacaaagagattgatctctctgtcgttgaactggatcgcaaactggctgatgtcaaaatcaacctggagatcatcgaactgaacaagcaaaccgaaagtctgggtctgactgtaccggaagacgtgatcgccgctgtaggccacacctccgtaagcgtcgataccatcgtgacgaagattgatgtgttgctgggtggcaaaaatgccgcttccgtaacctccgctgacgttagcgcttacatcgactccctgaacgcgaaataagaggaaggggcgaaagccccttttttgctatgtacgattacactattgaacgtgatcgcggtgaagaatggttgatttctcgtgcgagaaacttctatgttaaacttcctaaaaactttcatactttaccgaatgatgatactgatcgcttattgagaattctcgtagatgggaatgttccacagcgagtttttcaggaaatggttgatcatgcgtgttctgaatgggataaaaagtattgcgaagaactgacgcatgatagtatagtaaacagcaaccttaaagacgcttacgaacgaagaagtgtatatgacatttacgaaaaagagaggaaagaaatgatgttcgaagacggcaacagtgcatttaaaccagcacgtaaaacgtatccagactggcgcaaacagtacgcagaacagttatggcacattgacattcccgaagcgctcatgaaagcgattagccctgcggttgactactattcaggctggaaagatgaatatgagttagaagtcggttcgtttaaggcgcacgtcatcaaagcgaccagaattcttgatttcgttgaagctgttgcgtcgtgtgatatcgttgaagatattcgtattccgtcaatcaacgtttcgcggtatagttctcctggtaacattcgcggggatcgttatgcgaacctggcaagcactacggataagctgaactttcacaaaatcaatgaaaaaggatttgatggttgtgttctgatctcaatggtggttgtcacgacgcaaggcgaatacaagctgatcattgattgtgacaaagcggctcgtgcaattcccacaatcaaacaatgctttggtgaagatttcaaagtattgatgaaagcccgtgcgatggaaaagttcatccattcgtgcaaaaagaacgtgctggagaagtatgatccggcgctcacatacaccaaaattgataaagatctggtaggtgatttatgctgattaacaaagcgcagtgcaaagcgattaactttctgctgcacgaactgattgaaaacggtatcagatttgaattcgttgatccgattaacggtgatgatcgtcatctgctccgctgggtgtctggtagcaatccgctggattcagtctcccaggttgtagagtctgcgcataacaatatgccttgtcgtgttctgttgggtagcgttaacgcctcaacatggaatggatctgatgcttattatgtcggattcaaaaaagagttgacggaagacgaatgatgttataatatgcccctgtagacaacaaactataggggctaaatcatgaaaatcaaaaatactgctactgaaaatctttgcaacgaaatcgcggtgacttactggaaagaaggtcacgtaaaagcaatgaaggattttcaacagtggtgtgatacccagaagttagccaactgggaatacgccgtaatcgtggaacggatcaaagaactgatccttgagaagaaaggcactataaaatgattcaactgaaattagacacccaagcgctgaacaacctgttcccagaaggaacacaagcgcgaatggatctgcaagccgctgtcatcaagaatgttgttgacagcgttatcggtaagcgcgtaaccgaagaaatcgaaaacatggtgatcaagcacgtcaatttgatgatgccagccaatcacgaaatcgaaaagattgtgcataaagagtttgctgattacattcagaaacgctatgcatacagcaatgttttcgatatcaattcaggcggcatccgtcagatcaaagaactgatcagcgaacacgttaagaaacagtgtaacgacctgctggattcaatcaagctggaagcaatcaacgatgcaaccaaaaacctcaaagcggacgaagaagcgtttatggctcgtgtaaccaaaaacctcgaagtaacggttcgtcaggaaatcgttaagcgcgtgaataatgaattcccgcaaattatcgacgaagcgatcaaagcccgtttgttcccagaggcgaaaggctgatgaactttgaccgcatctataacatggatgtggttaacggtaaaggaatccgtgtagtgttgtttgtgactggatgcaatcataaatgcgaaggttgctacaacaaatcaacatggaatccccgcaacggtacaccatacaccgaagagactgaaaacgagttgattaaactcctttcaaatccccatgtggacgggttgacgcttacaggcggcgatccgttttaccgcaccaatcatccaacgctcttaaaactgcttgagcgcgtccgtgcgacgtttcctgataaagacgtgtgggtttggacgggatacaccctcgaagccttacagagcgatacagaacgttctaagctgttaccattcattgatgttctgattgatggacggtacgaaaaggatcaaccgactaagaaaccgtttcgcggttcggataatcagcgaatgattgagttcaaaaagaattccatcgaaattaaaaatatcgcttgacctggttggtggttctgttaagatatccacgtagcataaatttaacccaattgagagataatatcatgatcctgaatttcaaaacccgtaaagaagcccgtgactattgctggaagtggtcgatcccgctgaaaaacatcaccaaaggaagtggttcacatccgtggacggtgagaaccaaagaaacccgcttcgaaactggtaaagattacaagctggttgatgtcgaaggtttcactgacaacggcaaaaacattgcgaacagtgttcaatcaaaacagatccaccaattactgaacggtgttgtaaacatcgcaagccgtaacggtgatcgctacaccttcaatgctccggcaggtgttgctatgaacacccttcgtgcatgggaagcgaaatacttcacagaagttgctccggctaaagccccagcgccaaaacgcgctaaaaaaccaaaaccagtaggcaaaccgtctgttgcacctgcaccagcgaaaccggatctggattctgaactggatggtggtgttaacctcgctccggcagtaaccgaaccgtctgttgctaaacctgctgcaccacagccagcgctcgtagaagcgatgcctggttgttttgttgccgaccgtccgtatgttctggtagatgaaccaggtttcctgcgctctcacaccgcgaacaaacgcattgtgcaacacatcaaaaacaacaacggtgttctggtgttttcgaatgttgacggcgacggtgacgcgacaatcacgcaagatcgtagcctcccgtttgtgatgcaccgtgagcgtaaattcttccgtgaactgggtactggtaatccggcaaacactccagcagttcaggcggttgatatttccaaacagcaacacgatcaactggtcatcgctgctgcacaggcagtagaagacgcactggcagaacaccagaaagcgatcgaagttgtagcgcagaaagctcgcgcagttcgcgaagccgccgcaaaacttgcactgctggcaaataagtaatataattcgggggtgcttacggcatcccctttttatttgaggtaatcatggaattattcgctggaaaaacttacggtttaaccgtatcccctgaaatctttgcagagaaaacctggaaaacaggtatcgcaaacatcattcgtgaaaaaggttacgtgacgattgatcgcacctcgatcggtgagttcgaagaccgcgcgtttatcatggacggtggttacgaatatgaactccctgcatcactatggaaatggttcaaggaagtaacgccggaagagggtgaattcaccccagaagaacctgaagaggttaatctcggtaacggggtcgagactgaaaatggtatgcgtatcgcaacgccggaagaggtttccgctggtgtcactggttcggatctgtgcctgatggatatccctaaattcacgtatcgccctgtacaggaaaatcctttgcgtgatctccgcatcgatccatcatttggggctaacctggaaacgttgagcatcgcaccgatgccagtacgtaaatctgatgcaatgcttcgtttcgccttgcaacatgttttcagtggtggtagcatctatcaaatcaacatggaatctgaactgaaaatgcaggaagaccagattgcaaacctgttcgatctgcacactcaattaaccgctgttgaaaatatcgaaaaactgttaggcaaagagaaaaagcgtattttgcaggatctcaaaccatacgggaagaagaatgaaagtcgaaatatacggaatccccgaaagtcttcataactgttacgggtgtatacaagcacaaaagctgttgacagaaaaagggatagaatatacattttatcccgttctgaaagaagcgaaaaacgatctgggctttgaatacgatcgcccacgtatcgaagagttagcaaaacgggtaaggcaacgcagtttagcgtttcaatacccgcgtatttttgtcgataacaaacttatcggcggttatctgcaattgaaacaacttattggtgattaaatgagccgtgaaattttactccctgctgcaaatgctgttcatgctgaaacaatggaatacatggagaaattcgttgaacgcgataacaccgcgatcatcactcctactcacctggacgcgctcgaagatcgtcttcataagcagattaaagatcaatttcctgaaaaggttagccgcaacttcattcgtcaggaaatcgttgcaatgatactgaaacattacggcgttgaaatcttcggtgtcgaaccactgaaaccgaagaaagcacgtcaaatgcctaaacagatcaccgacgaagcaatcaagaaataccagaagaaatacgctaagaataaatgatctttaatacgattgaatgtgttccttcaagcggtaaaacaaaggcgattctgaaccatatcaatcaaacgggcgaaaaagcaatcatcgcttcgatttccatgatgttatcaaaacagtcttatgactattacatcaaccaggtaaaaggaaaacgggcggtgattgtggacacggatcaccgaaccaaaagaaccaataacgatgcgctgcgtgaagtagtcaatgattacgatgtgatctttatcactcatgcagcactcaaaaacattgatgactttgatttgtataaggatttttccctgtacattgacgaagttcctgatttggttgcgttcgaaagtctgcgatttaatagcaatatcaagcacatacgcgagatttgcttgccgtttagttgcaatgccgatgatatcgttgatttaaaacttgacgaagaaaaacgagaactggttacacgattagcctatgatgggcttcgtaaacgtgatgatatcgcaatgaagatgttcccgctttaccgtgctctgttaggggctattccggtgaagatgcaatgtagcgattcgggatatgtctgttacttcgtagaggatcatgacgtaagccagtggaagttcaaaaatgtaaccattgcttcatccaacatcaaagacacgattacagggaagatcctgcaaacgtttcatgatgtggagttcaaagattcaccgcttcaaaagctggttgactttaagcaatacaaaaacactgggcgcatacatatacatgtgctcgcagagggggattattcgcggtatacgggcgatctctctcaatctgggacgacagtatacactcagattaaaaaacgcgtggaggcgcttttagggggcgaacagttcatctattgcaccaacacatacagatcgaagtttagcgaggggcaggaaatcccgtataactcgcacggattgaacttctattcaagttatactaacgtggtggcattattcagttacaacccgttaccctggcttcgtcaaatgttgcgagcggttgcggtgtcctctggacttgaagaggaagaattagttgatgcttatgttgtcagtaaatattacgaaccagcctttcagttatgcgctcgttctgatatccgacacaacaacagcaaaagaaagattaatttatttgtgcctgatatgcggttagcgaaatacatgaaggaaaaatattttcctgatgccattatcgaaaccacagaagcagttcaaacgaaaaggcaacgcaaatcatttcaaacccttttccaaatgacggacaaagagaaaaacgcttttacgccatacaagaaaagaaacaaattagattatgcgaatcctcttcatcacgcgattgttaaagattggctgaacaattaccgtgagaaaaaggcgacttgagggtcgccttttttgtttataaatatcagtattgaataagataaaggaaaacgataatggtagctaaatcattccgcgccacaagtggccttgatgctgctggcgaaaaagttatcaacgttggtaaagcatcacgctctgtgttgagcgacggcgtgaacgttgacttttttaacgaatttaacacgatccaacaatacgattctacccgtggttatgctgcgtttatggctatcatgtacgcgcgtcgtatttggtacgctcgcgcagatattccatcaccagcgggtgctttcgatgaaacaaaatggatctcaacccgtaacgatccaaaatgggtatataacaacgtaacgagcactgacggtctccctcttgaatccggtacgtacttaatggctgatggtcgtttctctgaactgacctatattctgccagatgcccctgttgagggtgatattatcaccattaaagacggtggcggtcttgcaggggttaacaacctgttagtacgttcaaacacccgtcagatccgtttacgtgatattcagtcaagctcttatcgactgactcacccatatataaccgttgcgtttatttttaacggcaacttatggcgtgttgctgaaatgcgtgataaccgtgattcgcagtttgttaatgcgactggtttaaccgctttccaaatgcaagcgggtatggtaacattccgtaacagtggaacgggtaaaattacgttgcagttgcctcgttacgcaaatgatggtgactcaatcacaacttacgatctggatcgccttgcttcggtgaacgttgcgactctgcaagtttatcctggtagcggacacacgatcagttatgacggtatcaataacgtaccctctgtgacttcacagcgttccggttatggtattttcatgttcgatcaggctaataaccgttgggttgtttatgacggtgatcagcgcgttcgtctgcgtcgtatcagtgatgacctgaacatgttgccgaacgattacgtgttcattactcctgttgctggtagtcctccaactgtgcgtaacgttacgctgactcttccgcaagatgttgccgaaggtgatcgtgtgtatatcagtatgtacatgatggggaaaacgcagaactgcacgatcaaagttaaagatggttccggtgaaaagatccgcaccaacaaaaacatgatgcagttcccacagcgtaaggattatccgcctaatgattggttcagtgttgacactctgactttcaatgccgatactgactatcttccatacatggaattgtcgtatctgaaagatacgaaagaatgggtagttgcacagtatcgcccgatcattgaacgtgtcgatccaacaaaccgttctcgtctgggtgtgattgcgctggctacacaggcagaagtaaacaagaaccatgaagatacgccgtctgatgaactggcagtaaccccgcgtacactggcgaataaaacctctactgaaacgcgtcgtggtatcgctcgcctggcaacaactgcggaagttaaccagaacacgacagcaaccttccttgatgacgtgatcgtgacgcctaaaaagctgaacgaacgatcagcaaccgaagatcgtcgtggggtgctggaaatcgctacccaggcagaaacaaacgctggtactgatgacactaccgcaatcacgcctaaaaagctcgatacacgccgcgcgaccgaaaccttagcaggtatcggaaaactcgttacaacgggcgctacgacagcggagggggctttacgtggggatgctggtactaacgtctacaacttcaataacggtgttgatctgatcaccccgaaatcattgaacgagaagacggcgaccgaaaagtcaaaaggtctggttgttctggcgactgaaaacgaagtggtaactggtgctgctgcgggatctgcttcaatgccgatcgtagtaactcctgaaatgctgcatcgtaaaacgtctactgaaacgcgtatcggattgattgagatcgcaacccagacagaaacaaacacgggaactgacgatctccgtgctgtaacgcctaagaagctgaacgatcgtaaagcgactgaatcacttgatggtattattgccctcgctaccactgcggaagttgcagcaggtacggtaacgaataaggcggttgttccggttaagctgaaagagttcttcgacgttacaagtcatgttgcggttgctaccgatgacggtttaactcagtccggcactatctggacaacgattaacctggggattgcgtctgctactgaaacacagcgcggtactttacgtgttgcgactcagggtgaaactgatgcgggtcttctggataccgtgttcattacgcctaagaaactgcaagcgaagaaagcgacggataccgccgaaggtattattcgttgtgcgactaacgcggaagcgggtgcgggtactgctactaacctggcaattactccggctaccatgcagttcttgaacggtactgatccggcgtggggtgcaacgacaaatcgacgcggtgcggtgtttatcactaccaaagcaaacactttcatcggtgataatctggttggttctactcaggccgttgacgattatcttgaagatttctatgctgtatcgcctcgcggtctgaactttgctctgcaaaacttcttaccgaaaatggcaacggcgcagaatagtttgagtctgggcggtgtggttgctgcaagctggatgcgtcgtgatgcaaaccagacggtaactggaaataacacgtttaacggtacaagcaacttcgttggtaacgtaaccactaacggaacactgacggctaacgctgcggtaacggttaacaacaccgtaaccacgaacaataacattaaccagtctgcgaaagcaaacactgtttatgcaaatactgttctgagtggtgaggctgcgggaaccaaaaacttgcttcgtacattccgtggtggcgtggcggatacgatctggcatgaaactgttcagggaagcacgtatcgcctggcgacgggcacaacggatctggttgacgttctgacagtaggtgatgtcggtaacggcacaatggcgtattccggtacgaacattcgtctgaatggtaaagctctggctaacatcaacacggcgggtgatttgtttgttgcaagtacagcaacgcctacggtacaattacgaaccgctgcaactaatggttggaacggtgtaacaatcagtaatgacggcggcacaaccactgcaaccgtgatcaacacccgaaactttacccagcatcttgacagtacctatgtcaacgtagcgggtgatactatgactggtgcgctgtcagttagcgtaaacggtacgggtggacgctttaccagtgtgagcggtacggcacatgttcaggcgggtgatttctctgggaacgtccagaaaatgcgcttaactggcattgacgataaggtattgactgagttcaacatcaatatcaccgattacaacaaagcgatgatcaacggaaacctgatctatcatgcaggtcgtaaaccgactccggcagaaatcggggcggtggcggtagcgggttcaaccgtcgatactctggttgtacgtaactatatcaaaatcggtaacgtgaaaatcttcgcaaacccagcaactaagacttgtgaatttgtgtgggaggaataatttaaatggcgaataacgaatttatggcgttattcggccctgatagtttcacggcgagtgtgttttcagaagcaaacgccgtgaaatatcgccttgttgtccgtggaacgaataacgattctgcggtcaactcggttgaggtatctatcaatggggctgatattattaaccgaaacgtacagcgcggtcgagggattaaccttgctgtaattgacggtacgagtttggctttgctggatttcaaaacttttgatatgtatggtgatcctactacgaatgggactgcgattagtgattacctatctacacttccagcaaacagaattgtatgtttctatacgttcgatgctataaaatctaccgatgcgtttttgagttatatgcgcacaatcggatcagttgcatggcctgaaacacgattctttaacacgccgtcatcatcaacaaacaacccgcaccgttcatcctattcagcaatctattcatccacgatgaaaaagatctgtatggaaaacttcgtaggtggttctggtactggactcaaagacaacacgacgagttttgttgaggttgtattcgatgaattcagtgatatcggggtaactggtattcctgaaagaatggttgatgatgttcaggtatatcagaacagtggcagtgcttacggcttccatttatatgggatgtgggatattggttctactgttttcttgggggacatctttaagttcactggtgatgtttattgctcgcaagaacttcgcaatgctggcggcgaatgttatctctatatgtggacacagaacgcctctggtcaatggatatcctctgcggtactgcgaacaactgggttagctcctgatgaatggcattctctgtcaggatatttcactatccctacggacgcgctaaacgtgaagatgggatgtatggtatatcactacccgtctaccgtgaaagtggggcttgctcagtgtcgcaatgtccagatcagtaaagttccacgaatcgaaaccgatcgcaacggggcggcaattggtgtaaatggtatcaggatgcaaacgctttccgaagttgatgatgctggaacccaaaacccgattgataaattgctttctctgcctgtttcgcctactggggttattagtgacaagaaaatcagttcgcataactttgctgaacttgattatattgtttctgatccggttgaatacacttcgacaaatacagcggagtaccagttcaaagaatggactgctacccagcaagcggcggtaacgaaagcatcactaagcagttacggattaaaagctggtgatacgatccgtatgcaatgccaaatgaaacgcgatgcaaatgcgattgctaacaataaaggcgcatatattgtaatgcagttctgggacgcgaataatacgtatatttcagggatcaacatgcgtgatgttggtacgatcccgaacgtatattcattctacaaaaacgaaggggttattcctgctggtgcggttacgtttgatttcggtttatatcgttatccaaacaacacaaacatcggtacgatatccgctaaagacgttaatttgtcaatcgtgagataaaggggcgaaagcccctttttcataaatacagtcattacaggagaaatttttatggctgatttgaaattaggtacaacgctgggtggtgcgggtatctggagtgcttctaaccttcctctattgccctctggtggacaattaacgtataaaggctggagagtatacacagaaaatgatcgtccaacagcggaggatatagacgcactatcgacgattaacggcggtactgttgcgaagaatactacattcaatcagaatttggttgtgggtgcttcattaactgctaacttgattcaatcgaatagtgttcttaccatccaacgtagcgcaaaccctgcggaaatgattttctatcgtcccgatattacggcaaccccgtcatctgaagcatgggttttaaacatgtatgcgaaagatggtttgaatcgaggcatgggttcgttgattatttctgctagtactgacggtggaaataaagtatatctgcgggcgaataaagacggttcccctaatacaagtttaacgctggattcgcaaacccaacaggtaacagttgagcaaggatcttttcgcgtaatcggtactacgaatcttggtgtgacgaacgccgcatcaatggcggttagcggtgcggtaactgcgaatacagtaaccccgacaaactgggctaaccatgatgaacgatatatgacgggcattcctcgcggtatgtctggaacaagtttcggtgctgctgttgtaactgaaaagaacgatgttctgtcggtaggcggtaacatcaccgacggtccatatggtaacactacgtattacgggcaggttgtcaactatcgccgtacattgaatagtggtgtttctctggttcagacttactatgatataacatcaacatggattcgtgctgcgacgggttctcctggtgcatggtcttatagtgcgggtgatgctaatggatggagaagaatttatgatacttcgcttcctccgactccggcggaagtaggggcagtcaataaatccggtgatgcgatgactggtgttctaacactggcaaacatatctcaaccacttaaaacacccggcggtggtgttctggctaatgacgggaacgtgtatatcaacaaaagcgggtttgcaggatggattgatgctttattcttgaaaaatacaggtggtactgtaacaggaacaatcaaccagacaggcgggtattttgatacatctgccgaagggagaggttcatgggcttcacaaaacaccgcaaaagctccaattttccaaaccattaacacaacagcaacttccgaatactggcctattgttaaacagtattacacacaagctggtggtgcttggtctatgggtacgttggtaaacactaaccgatttaccgttcattaccgcacgagttcggtagatcggcagtggtattttgacaattcaggtgaatttgtatcatctggtgatattattaccacctcggcaaacggatttcgtatcgcatatggcaacaccggatcatttattcgtagtgacggaaacaacacgtatttcctactgacaaatagcggtgatgtttatggtggatataacaatttgcgtccgatttattacagcaacaccacgggtgctgttacaatgggacatacgttatccgttaatggtcgtattagtcaatctagtagttatattgacaatggaaatttaacattaaacggtagcggcaacggacgcgttgaatttattcgcagtggtgcaaaccctcgcgatatgtatatgttccatgctggtgatgcttctcgtggaaaccgtattgaaatctctgatagtgcatcatatctggtttattttgaacgcaacccttcatccggcattcagttggtaatgaacggtaacggtagctttagcgatgtgtatattcgttctgatgaaagactgaaaagcaatttcagtaagattgaaaatgcattggataaagttgatttgcttgatggtatggtgtacgacaaagcaaatcatatcgggggtgaagaaactacccgtgaggctggtttagtcgcacaacaactgcaagaagtattaccggaagccgttaagaaaggtgttgatggtgaacagaacgagatcttaactgtttcttcttctgctgttatcgccttgctggttaacgcggtaaaagaactccgtgaggaagtcagggaacttaaatcccgctaattaaaagcccttcggggctttttctttttataaatatcataaaagcatttgaggatctaataatggcagatttaaaagcgggtactaccgttggcggtaatactatctggagtcaggcgaacttgcctttgctcccttctggaaacacaatcacatataaaggctttaaaatctacaccgaaaacgataagccaacaaaggcagaaatcggattaggcaacgtaacgaacgatgcacaggtgaagaaagctggcgacgatatgaccggatctctgaaccttacaggaccggatagtcaattaactgttccgtatcgcctcctgatgaaacgagcggcaaatggcgatccctatgtgttgtttgtacgtccagacaacaacccaacaacggtcggttatccatcaaacacacttcgtgtaatgactatcactgctcgtgccgcaactacagcagatccggtttctggtgctcaattggctaacgtattagcagatcagacagcacagggtaacggatcactaacattgcaagcatttgcagccccaaatacaaccacaggcgcaagcggtgcgcgaacagcagagatttacctaaacggcaacgggcaagtatctatgacgggttccggtttaacgataggaatgcagactgttgttagtggtactatttttggtacacaaatggctattaaaggcgattcgaaccgaaacctatacttccaggatgctggcggtaatgagcttggtttgatctatgctgatacaggaaagaacttatatgttcgtactggcggtggtgcatatgcaactcgttttgcatctgatggaactttagttctcgctaaccatctaaccgttcctggtcaggctacatttaatggtctgggtgtgttcaataaccgtgcttctgtaggcgtagattatgattcgcaaggaataaactcagcgattcttcgtgttgaaacaaacggtgatggaaacggggttggtgatggtgttacccacttaggctataaagacggcaacggacgatataaccattatttccgtggtactggttcgacttctatcaacaccaaattggggcttaacgtaaacgtaccatcgtattataacgacgttccacagggcacaccagcgcaatatttcttacctactgttggacagggcgggaaaaactatttgcgtcagttccgaggcggtaacgcggacacaatctggcatgaaactgttcagggtggtgtgtggagactggcaacaggttctacagacggacaggaagaattgcagatttctactgcgggttatgctcgattccgtaacgaagttcaaagcgctacgtctggttctggtggacagttccgcgcggtacaaggaaactacggggtaatacaccgaaatgatggtggtaactactataccttgatcaccaactccggcgatccttatggaacatggaacagtttacgcccgattactatcagcttgactactggtattgtttctataggaaacggcgcgaacattaacggttctgttaactttggcaacgcggtaaacttcaacggaacggtcgaaacaaacggtattggttgtggtacgccaaacggattgggtacgactggtatttctctgggtgataacgatacaggtttcaaacaggaaggtgacggtattctcaacgcctatgcaaatagccagcgtattatgcgatggactactggtgcaactgctaactataaacagttacaggttcagggtgttaacgggccagcattacttctgaataacacagcgactaaccaatcatgttatttgctgattactttggcaggtaacaacggcgcatacttcgggtttggtggtgctgatgataacgtatcggtacacaactaccgactgaatacgaccttacagttgcgtacttcggatctgtatatgaaccgtggtctgtatgttgaaggtaacgtaaacgccaacgatgtgtatattcgttccgatattcgactgaaatctaatttggttgaattgaaagattcattaagcaagattgaacagcttaaaggttatatctacgataagcaatcaaaagatgctgatgatatcgtataccatcgcgaatccggtctgatagctcaggatgttgagaaggtattaccggaagcagtgcgcgaagacatcgacactggtatgttaaccatttcaccttcgggaattaacgcgcttctggttaacgcaatcaacgaactgcgtgaacgtctggaagcaatcgaaaacaaattaggggcttaattgcccctctttcatgaggtatttttatggctattgtaggagtccctggctggatcggttcgtctgcggtcacagaaacagggcaacgatggatgtctgctgcgggtaatgcggttcgaatcggaacaccgttttatatgtctcgaatggcgggacaatcggtatataacatcaactttacggtgtatgagcgttactataacaacgcccgttatcgtggtcagtggggggttggttggtattcaccatattcgaaaccttccggtcatgatgcggttggtggtagttttaacggcaacgcattcggtactgtagttgcagcacaatcaacacctgatatcagtgtaattactattcaaaacggtcctgctgtcaacctacgtcttactatggatgacggcggtgtattcgattttgacaacaacggacgtatacatgatggatatcgtcaatatcaggttgtttcttctcaggcgaccagttggtatgactatctgaacgcccgtacaggtcagaaccgttctggtttggttacgcaacgttaagtaaattcctaaatatattcgggggtcggcatccccgaacttgaggtttaaacatggcactattacaagataaattggcggtgcttgaacgggtaatatcgttcatcatggcggtcaaaacatggaaacagttattcattaaattggttcttatcgtcactattttcattatgttcgtaacatggtacaagtgggatgacttattttcagtctggaaaacatcttcaagcgttatagacgtgccgacgatggagattgaaaaggcaaaaaagtttgaatccgtatccatcgaacagttaaacatagtgcatttaactacgggtgcggatttttcggcaatctttgggttcagacctaagaatgtcaattattttgttgatataattgcgtatgaagggaagttaccgcaacagattaacccgaaaaatctgggtggctatcctatagacaagacatcggaagagtataatagacatataaacgggctgtactatatctcagatattgcaagcccgtatcttccaacaaaagaccttgttccggtagcatatacctttagttgtccttatttcaatctcgaaaactactattctggatcgattctaatggaatggtatatacagaagcccgaagtcgccgatacgaagttgatgatcgtgtgcaatcaggccgcaagaattttaggcaggattcgatgataatttcagtttcaaactactcaaagcccgattgatgaaatcttttactttcgtcatcgggcttttatcgtatatgtcccatacgcgcatgagttcgtaaggtgtcggaacatattcatcgttccagtatccaacattacctatcgtaatgcgccggaaaccagcctctacgctgtgatatacaaagaacccagccttacccacaggggcgactttaaaaccgcgtgtagcggctttcatggcttcgtcgtgtgtcatgatagaatcacttcgcctctgtattgattgtgatagatgtatggacgaacacccagtgggtgattatctatgactaagatcgggtcaagttcgtcgttgttatcatcttctgcaactatatcccagtcggtcgctttctgttcttcaacactggcaatgaatacctggttaatctcaaccttacggtgagaacggcgaatgatcgtatccccttcgcggaacacgatcatatctgggttaatcgggcggtacgcggttttacccgcgcacacttcattaagcatttcttcgtatgtcattataatacctttactcgctgaacgattgtttgtttaacttctttgtattcgttgtgaagtttaggtgtcgctttgaagcgaatcacatcaccctcttcaacaattttgtttccgtagtagataaccacgttaccatctacgttgattttggtcatgaaacgttccacttcggtgtaataagaaacttgggtatatccgagagaaatcactttctcaacaaccccgctcatttccatacgcttaccgatttccccgatgtgctgtgctgctgcgatcttcgcctggcgctctgcttcccattctgcgcggatctcttcacgtttagcgatgtaatccttctccagcgctacgcccatgcagtaagagcaaatagcctgaaatactgggctatcgttgccgttttctttgcactgatcagcccaccacagaatcgtatacatcggcatatcagcaatcacttcacctttacgcttaccgattggcatgatgccctgttccagcagttccaggttttcggtatcctgtacggacagtttaccgcgacgttcaaacagatcgaaatctgcgaagccctggaacaccatctggaaagtatcggtttggttcagacgatccaccatgcgatcgaagtattcacgcgctttcgcttccgctttatctgggtcagtagacaggttgcagatatagttatcagaagtgaattcacctccacgacgctctacacgcagagtgtacatagcgtttttagcgccagaagaaatgaaatatgtcgcggtaactttagtcaggttagtcatggtgaatctccttagtggtttcgtttcgacaaggccaatataacaaaagccctcaaccgaagtcaagggctttttatcatgcgttcgaatctttcataactttatgaagatggatatcaaaaattttccagtatgcttttccgcgaggataaatttttgctttatcaatgtcttcgttgcttccccatgtattgtttgggttacgacaacgattttttgcataatccatgtgccagaataagcgctgcaccgatgaatctgtgcctaatggatcttctttgctgaacagaatttgtgaactcataagaagaaacctgttcgaactactaaatcgatctgtttttccggtatcagtggcgctttatcgtcaacgttgcactgataatacatcccgacatactcatgaggaacgttggattcgctcgcccatttcaggttgtcatctgtacgcggccctaacatgaggttaacgatattgacagcgtgatcctgttctggggtattgttgcatccgttcacataatgtccgtgagcggttttgaggatttcaatgatatcttcgtcggcttcaacgagatacagccccgtgttttctgggatttcctcaagaataatcaaagcggttttcatcacacttacctttatgtttctgcttacgttttgcttctttaagtgctcgcttgcgatcgcggtgagtagaagcgcggttgaaatcatgtttcgctaccaggttgttcatcgaggatataatggcacatgatgttgaatactgacttcgccatacagttttacgatagttaagctatcagatcctttaacaattctgtatttttctggaacaacgcggtcgatttcttttttgacaaagttaagcaatccgaagtcatctatatcttttggtgctttggaaatagaagacaacgatactcgttgacgtgaatcatagtacgaagaaattacaaacatatattattttccttattggggcttttcagccccattttagataattaatccagcagtttgcggatcttatccgcgatacgtccggcgcgggttgcgcttgcggtgtgatcgctttctttggtagccagttcagccagcttacgctgatgttcttcttccgctgctttgcggtctgctgctacctgttcgacctgcttctgatcatgcgcaatacgcgcttcgagttcggtcagggttttgtcaaaagttgctacgatttcgtctacagaacggattttggaaaacagtttcatattcattatctcaattagtatggttggaattcaaagtcaaacagatcatttagtgcgcggttgtattcagtatagttctcaccatccccgaaccgcatctgaatcgcgctttccgctattgtaccagtaagatttgagaaaccaaagaggtttttaatcttatcgtgtgcaacgaagtacagagaagcactatccagcaaggccaccatcgctgatggttcatgttcgcggcgtttgatgcgtaacagagtacggtttgcgccagtcttacggcgttgatttggggctacgtagaatcgaaatactactttacccgttttatcatcaactaccaggtagaagccgtgttctttcaggtcaaccccttcgaacttggtgaagtcaccacgcttcatgtcacctatcttaacagcatatttgtggatgtcaagccttgtcagaattcttttcatttttcttcaccagtttatttcctaatttggtgtttacaccagttttcatattcattgtcagtaccagcaagaagatagggcatgacaaaatcaagatcgttgcgccgaacactaagcgaactaagcgaatcaacaacgtcccgatccatttcatcggtatctctacccacttctgaaccgttgcgagtaccagcataacataacccagattaaatgcaagggctgttgcgataataccgtaaggttttttgaagtatgtctgttcaccgtcttctgtacgtccagcggtaacgttgcctccgttccagatttctttagcggttttaatggctgtttctgccccgctcaagttctgccagtagtcgggggtactctgtaggaatttcataatcgaatcctccgcgcctgaatcgctccaggcgctgttttggggttagtagtgactgaatcccacggttacatcacgcatcacctgataacggcatacacgcatcttagcgttgtcgtaatctgtcgggattgctacaacatcgcgaggattgaccttaacctgaatgactcgcccacgtccaccgccataatgaggcaggtacgattttgcggcaacatgcaaaccgcatgaacaggttcggtttttattctcgtctacctggttacgtggcatttccaccacaacaccaggggagttatcgaacttaccggaagccagatcgcggaagtcttcacgaacacgtttccacgcgtagaaatctccgtcatctgccagttcgatatcattatgcaccatgaacccataaagctgatacacagcatcgcgtgaagggttttccatcaacttctcgaagaagttaaccaggtgctcgtaagggcggtcgttgtacatttcacgaacgatacgttgcgtgatgccgctgtcaaacacgatatctttgtacaggactttatgcccgatgattttaatgttgcctttgctgtaaatcttcaacgcttgcgttgtgtccaacagggtagcaactccctcgatgtctcccttaaccattaaagcgtgtgctttttcgaagttagggtgtgacgaatccgctgtgatgatcttgccgtccagtaccagagtaatgaacgattcagaaccaatcattttagatttgacatctgtttgcggaagtggtttcgtcgcttccgtattatacttagcgtgttgctcggtaataacgcgcccgatggttcggacgcttacaccaaattgtttagccagtgcggttttgttcgcgctggtaagaaagccctcatagactgctttcttctgtacatcgtcaaggatcttaacgtttctcattatttccaccgtataaggttaatcaggttcgtcttgatcttatcgtccgtaatcatagtacggcctaaagagtaagacgaattgcgcaacacatacaccaatgcagggttgcgttcttcaaacaaatcaaaggcggtatcaacacgttctttcatatctttcagcattttgtaatgcttcacagacatttcacgaagtaacgggttacgcaccacatttttggatttgtttttgttctcgatagtatcgtaggtaaacttaccatcaagataatcaagcaacaaatacaattctgaattatagcggtttttcaccatgcgatcaagagtcacctccagataatcgcgaagggttcgaacctcgctaccgtgtttagacgagatccaggctggataccagttaggcttcatctttttcaccgcgtcggcaaaacgctgtaccagatagtcatcaagacatttcatgttgctatctggaatgcgactccacagagagtttcgcagaaccataacgcctttcagcccagtaactttcaacagggtcatcatactgctggcaatactacccagtgtatagttcggtgcttctccgtccagtcggctatattcatcaagcccatagaggcgcatagcgtacatttcatccagtttcacgaactgtgctttagtcaggaacagatcatttttctgtaagttaccctggtcatccaggaagtaatgatatgccgtaggcgttttcggacgtggttcagaatcaccagaagatgattcacgcgttgctttccagcgcttgcgatcttcggtgtacgtttcgaattctttggtcaattcactggttttcagtgtaacgatctcagattcatcgaaatagccagtttcaatcaactgacgcacagagtcacttttacgatcggcagttacgaaactgatacgatccgaaccgttcatcatgcagtaaccgatcagatacgggcggagtgaacgcgcttcgttatcattttcaacgatgaacagtttcttctgtcgccacggttggatcatgcgcataacgtcctggcgtttggtggtttccgctttatacttctcataacggcgaccagaacccacacgttcgaatacgcaatctttcccgtcatatgggttagcccagaagccccacacatattttccggttgctgtatcagggtttttgatgcgcgtcagaatttcagccagcgattctttacccacacggaaacggttatcacgggttacgaatgtctgtaacaagctaggcagattattgaaccatacgagtttatcgcgggttgtcttctgctttttatactgttccatcaactcttcatcaaagcgtttgttgattttatccagtcgatccgtaatcactttcttcgtgactttatcaaggctcaactcttcacgcgacggcatgaagtccagcgatcccagagggaaatccagaatatatgcgtaattgctgttacggtagcagtagaacagcgagttttcaaacatatccaggtcgattggatagcaaatgttacccatacgcgcgtatacgcctgaatagtttttagactgataacggatgatcccgcgatcgtctgcttcttttggttgccagttaacatcaatctgaacaccaataaagcgcggacggatacctgtaaacggttcataaacacgcgccgcttctctttcccattctgcgatatcttcaactttcacaggaacggtgatttgaacgccgttaggttcgtctgtttcgatttcgtagatttggtcaacgaaaggttcaccattatccatgtaagccgtgtatgcgcgtttaacgccgtcctggatggattcgatagtgaatgtttcggtgtaacagaacggggatttactacccagtcccagcgccccgatcagttcgtcggtgtcggttttggtggattcgaaataggttgcaaacacctctttaaccatccagtcacttaaccctgtgccgtaatcacggacgatgaaacgcggatcgagaacagttggtaactgaacatcgaacgggttcatgttacccgctaccatatgaccatcaatggcgttactggagatttcgcgaatgattgcgcggatcttgtatttgtagatggttgatgacatgattttgtatgttttcgcactggtagccattttaaacttcgtgcgttcgcctttatcgaagcccgtagtgtgaatggtttgtggtgctaactgacgcaatttcattgtttatatctcacttggtgttgaagatgatgttatcacatgaatatttcataggcttttgatcaagcccatactcaacaggtgtacacatccggtcaaggtattcgtaaacctgttgcttctgacgttcgcggtctttcatatccatgataccgaccacgatagcagttacaaaacatattgcaatagtacacagcacagctattgtaatatattttcccgtttttggtgcatcatatggtttcattgaatcgcctctgcatattgttctggtgtcaatttacgcgctactaagcgccctttggttgctcgtttgtttcttgaaatgtagatgtttgcaatgttgcgtttaccttcctggatctcattgtacatcttttcggtcatattgcactgataaacttcaccgttcggagttttcaggaaaaacgcgtatatgtctttttcgctttcctgaattactgatttctcacggatacggcttttgcatggtgtaggctgtgcgcccaactcgatagctttacgctgccatacgatcccgtgtccagccccttcggtcagagcatgtgcaatttcgtgcatgagagtatctaaaacgttctcgtagatatcttccttaacgtgagaacggcttaattcaattgacttgcgactgtaattgcattgtcccagagtacgcttgaaacgtccgttaattttgaaagaccaatgagataagccatgcttcgccatgatgcttttggcccagatggttatttccatatcgctacgagttttgaacattttatatcctccccaatcagtgaggacactatagcaaaaaagcctcccgcgatgcaagaggctttttgtaaattatttcaatttcttcgaaagttctttcaaatcattgagatattcagttttcggggttgtttcttcccagtatttcagttgcttacgcagttcgttcgcttcgtcttccagcttttgacgttcatccgtggttagatgatagatgttcatcgcaaccaggatttcggcgtggttctcgcaacccgtccacgtagagacaagtttaaccgcttcgctgcgactaagccccttcaacgcgtcaggttgtgcgatcatctggtcaatgaagtcaaccttcgccagcgccttatctaacgcttctttagtctcctggatgcgtttatcaatacgctgttggtaaacaccaatacggatatcaacgaagtctttcagcaacgtttcaggacgctcgtatgaatgcagtttcccgttaaagataacgttgatgttcgggtttgagttctcaatcaatccgaaatctttcaggatcttctcacgggtaagcccgtttgcgtactcacgtttaagggtgatttcgtagcggaaatcttcttttgatagatccttgtagcttacgatataccctttctcttccagcttatccaggatagagatatatttcacgcgatcgtacttgaccggaatctctgtgatcaccagtttggttttaccctggagttcatacttgccgtaaatagtaccgttttcaatgtcacctttgaaatgcgggtatttcagatccagtgtgaaatctttcccgttcaggtaactaacacatccattcagaaccgaaatcggatcgtgtggtggaatgttggtagcgtatgctttcgcgatcccgctgaacccgttaaccagtaccatcggaatgattggcaggtaataggctggcggtacgtgttcaggatcttcatgtgggattgttaaatcctcgtccatatagatagccttgaacagcggagacagcttacatttaatgtaacgcggtgcgccaggtttcttaaccagacgggaaccaaagaacccgtcgcggtcaaaaagcgggatgttattgcaccagtgcgccgccataagagacaatgcctcttcaacggatgtttccccgtggtgataaccatacattgcaacaccgccagcgatagaggctactttctggaagcctgtaccgcctttcgctgcggaatgcacgaagaaacggtgaacgggtttgaacccgtctaccaggtgcgggatcgcacgagaataaattgtgtaaagagcaaatgtaagcccctccacctgtacaacgtctttaatacttctttccatcatttcaccgaaaatttatgttttccgttcacccagtctttacgcggatcggattcatcaccgaaacacagttccagaacgtctttgtattcgtcgcccagtacgattgtatcgtattttaactggtcgcccaacacccgatcgtaatcttctttacgtaaagaacccagccctttgatatatcgtacctctttcgccttatcgcggaacggtgcgaaatcttcaagggagtagaaccatttttcatctttaccgactttcgcaatgataatcggtgtgcggatataacggatctttttcttctcgaacaactcaggccagcggctaaagaacgcaatcagtagggtgagaatatcgcccccgtcaacgtccgcatcgaccatgatcccgatgttgtcgtaagtcatttcggaagagtcgcctggatggagattcaggatcgccatgagttcagacaattctttgtttttgagcacttctaagttactcattccccaggtgttcaacggtttgccacgtagcggaaatgcgccttgtgtctcttcgtttctgcactcgataaactgccccacagcggaatcaccctcggtcagaaacaaagtggtttctaccccgtcagtgtcgatccctgatgccggaacatgttttgcaaccttcgcctttttcgctttcttcttcgctttggtaatggctgcggcttctgctgcctgtttgcgaatcagagcggactcaatgatcggagtgattatttcagaagtatccataatctgtttcgcgatctttttgtagttcagtccggcgtggttgttgaactccccagcggtgttagtcagtttttctttcgtctgactatcaaaagctggtgcattgaagttatgcaaaaacacaaccaaagtcaagcattcttttacacgggctttcgggatctcgatagcgtgtgttttcttgatcatcggttcgagttcggaatagataccgtcgatcatggtgtcaacatgaacaccgccgtttttcgtatccagaccgttaacgaaggatttctgtttgaaaccgtcttctgtgctcgccaagatgaaactgattttgttgtttgtctgggtaatcgttttatcgccgtacatcgcgccatacatcgcgaatttgttcgggaggatatcgccgttatatgtgaatttaacggcagggaaagccactgcaagcgccataaggcgatctttgatgacttcctttgtctcttcgtcgataccgtccacaccgaagatagagaagtcaggggtaaacttaacggttgtcccttgctccttcgtcgggctggtgcggtaatccatgttctgcgccccgtccgtacagttgatcgtgactttgtgtttaccgttggatgtttcgccgataaagatcgcgctgtaacagtttgtcaggaaagaacctacaccgttcatccccattgttacgcggttttcgtcatcgaagttagaaccggatttagccattgtccaggctgcaacaggtttaggaacaatcttcccttccggcgttctcacgtcatcttgtggaataccgcgcccgttgtccgaaatcgttaccagattgtgatcaatcttcacttcgattttgttcgcatatttgaaatcagttcggatcgcttcgtcgatggagttatccaggatttcgttgatgattttcaccaacccttccacgtattccactttgcggaattgccccatgataaaacgttcatgggcttctttgttcactgaacccacgtacatattcggacgtttgcgaatgtgatcgcgatcgctcaagcagaatgattcatccaccttagcgccctttgctggggcttctggtgctttctgcggctcgttatcgtccattaagaaatctaaactcatattcacctcgttattagttctcaggcattatatagggttctatgaaaaagaaaacccctttcggggttttacttgttgtacgggaatccgtctttcaccatctgcggcttatcaaccgttcgtttcgcctcgcccccgcaatcacaatctttcggttcgtcgcggcttgcgatgctggacattttcggaaattctttttcgcacttggtgcatttataggtatatgttggcattaataaatctctgacaatggaataaaacggatcggggttgcggctttgctgaaaacacattgcttgttccctgcaaacatgagatcagtttcgtacaccatacaaatatatccctgattctccaaaatttgccgctcccagctatcgaaccatttagacaacttctgcaatgaagagaagccgaaaatatagctacgataatttttaccatgttttttgaggttacgcattaaacgaaggtcttcgcatggtgcggggtgacgagtctcggagataccgaagtttaaaccgaactcgattccatgaatatcgagatactcatagagatcgtcttcatcaccgacacaacccgtatacggccctaactgtttgcaccaaccatcatatgacgaaaagatagacgctttcaattcaacgcgataaaccaacatgatccgatcctcgtaattgattaactacaagtatcgtaccacttatctaatttcttatcaagcagtttgttgatcacctgtgcgatttctgttgttccgtgggttgtgctcaatttcaggtaaatcacatccagtgcgcacacgatcgcatcaacgctttcttcgacgatatcaccgccgcgttgaggctgaacgagacattcggagatctccccaacctctgcggacaggtggtgaaccacgtcgctaacggttcgttttttgacgctatgagcggtcttgaaaaacttatccagaactacagcggaattttcgcgcgttacttcctcacctttattgacgtggatcgtaatttcagtttctggttctggtgcaacccataccggattgaaaagccctttcatatcgttgaacttgataggaacgggaataccttcaagataaagaatccctgtttcttcatacaccatactgatccggcgtggtgaattgaagtccatcgggttcttacgcaacgcatcatacatacgacgaatcgggtcggcttcggatgccatttgacacacagccattaacatagatttcggggcgtacatatcaccaattttatacttgctcatttacaatacctttatgataaccaacaataaaacagttcacttctggacgttcgccgggaaaatgcacacattgcatgacgcgttcagccatgagttcttcgcccaaataaacagaggttgtttcttcgttgtaatggcaatcatacgaagttttaacactcataccaggcaatccggcaatatgcataaactttgagttcgtgcatggttttccctcgatgctttttccgtttacatcaaacgtcatatgcatttcggttttgctgttctttgggcgtctgctcatttattcacaacctcattatatgttttcaggttccattcatgcacttccggcactttggagtaatgatccaggaatactaactggacttgcataacactagcacgatccatattgaaaaggaagcgttgcggggaagtaatacacagaaaatcttcggtacttcctctgcttgcgctaaactcttttgtttctccgccgtcaaatttagcatatacaggcgtagaaaaatacggggcgaatagttcgcgtttggaatcgtccgtaatcgcactgaaacacacgtctacgagctttccggttccttcccgtctgatggtgagcattgtccctttcgtgcgccctaagacgtttacagagcgcgtagtgacatcaccaaaagcgtttgtgtaactcacagtctccacaaagcccatatcacgacgctgttgtagcattgcttcgtgttgtgcttctgcatcctgttctactactcgttgtgcggcttcatacgccgctttgttcggatctcttgattgccatgcgaagaataaaacccctgcggctatcagtccgaagattgaccaacttgcggtcgctgatagtttcattttaatattccaaaggggccgaagccccgattttagcgaagatagcgaacgtacccgctacggtcgatcgcgttctctgggttgttgaagatattaccgcgaatacccttagcaggtgctttccatcctgcggctttcaggatattgccgtcattgtcgatgaagccagcaactgaacgctgattgaacatttcaccagtttctttgttgcgggtatcctgcacgatacggtgatacttacggcctttttccagaacgaacacagtttcggtgtaatcgctgaaccacatgccagtgttacggcctttatgcatcgcgtccagtaaaggctgtgctgcggctttcagttcgtcaaaagtatacatggtaaaatctcctaagtgtgtttcgtttctatgggataactatatcaaagctatcccatgaagtctttagcaaaaagtgctatttgttaaacccgtttcccttgataccatttcgggaaaacaacccgctcgataaaagttcttcccaggttgaaactatcaccgaacaggagaacaccgaacagcggatcgcgtttgatgtcatttttcccaacagttttcattttcccttcatggatcacggtgtcgcccaccgtgatatccttgatgcttacttttacatgatgcatacgatcacctctgcgagtttagcaggttttgcttctggtctaactttcaacgcatcattcagattcttttcaaccataactactgcgtcgttttcgttgaaaccgttcttaaccaggactttaactactttggcttctaagtttttcatgatgcgttccttttgtctgtttcgtttcgatgtgtgtaatatactgcatatcgaaattcaggtcaatacccaaatcaaagaaaatcgtatttttcttttaatttttcgtaatacgtatcccatgcggcttcgtcgttgatgatctcagtaccgaaccgataagcacgtttgcgcagttcgaaacgttcacgaatgcgctcaacattgattttcactgattccggcgttggttgccaatctgcgcacaaatgacgatgaaacagggagtttgacagcggactaagatcgaaatcttcgtatgtaccgtccatgtattctttaccattacgcgcgaggtattcagcacgtaatgcagcatgacgatcgcgaaggtatcccagcttattgtaaaagaaggttacgtgtccggttcccagcgtatacacagcagggatttttgacaggttgatttttgccttaccggataaaacggcattgggaatgcgagggagttcgcgcagttctgcaatcaggtgttcgttcagaagaagagaaggatcgattgtgttaatacgtgtcatagttgcctccgtttggtatgtgcgcaatatacaaaaaagccccttgcattgcaagaggctattaaaattattttgaaagaggtataagcatctttcgcataccgccgttttgtgtggcatcatacacgcgtttagcatccataagggagagttcaacatggtatgatttccctttcccgtcaaaatcaaacgttaccgtaccgcttgctacgcttacatgagtaaagatgaactcacccgcgaaatgctttcgaaacgctttgtcgtgatccaggaaccattcaaacgcttccccgtgctggtacagtctgacgataatcattgaaactatgatgaaaatcagaactgctgcgacgatcgtaagctctttcatcacttacccctgtttacagattgacggtgtaacgcacggttaacgcgtggcgcttgataaggtttcattttgtacggtgttggatcagagtattcgatccggttaggtaatgaatacatttcaacatttggctgaatccagcggattgagtcgattaacccttgagttaacgcacgaccgaaacctacaccaactaaacataaacgcataatatccccttactgtgccagaatgtgaagccattcacccaaccacacgatcgcctgataagacaaccacaccgcgccggacacacaagcaatcacaccaatgatcgcgaatccgattaaaatgttcaaaccttctttcaaatcaccaaacatgttttatcctcttttgtttcagtccctacaaaataacaaagcccctgcacgaatgcaagggctttttatcataattcgactaactgaggcaatttcagaaccatccctggaaggatatagcttgcattgctaacggttttgcggttcaacttagcgatagactgccagcgctcaccacaaccgtataatttttcagcgattgaatacatgctatctccaggctgaacaacatattcatcgtattcgactttaacgaacgcggggttcatgagaatgtcaaacatctgcgctttcgcttcgttcagtgtttttgcatgtacagttttacctacaaatgataatttaatcatcttttcctcggcagactcaatggatcggtttcttcttcacttgggggttcttccagccccagcgcatatctcaatgaatagactatcatcaaaacatctttcgcgcaatcgtgaattgaattatgcatcacaaaaccatcaagcaaccctttccgaagaggacaggtcgaagcatcacgcgttaacaggcggttttcgatacatgtacgcacatcgcgactattccagaacacggtcggcatatcttcgaagatgtcgatcttgccaaccatcttacgcacgatatcaaccaggataccgcgatcgaattcagggccacgaacataatcgagtgattgccaacggctcacaccgtccgcttttaggtcttcaaagaattgtcgatgtcctgcatagagttccagatcttccggcgacggtttcaggatttgacgggcttcttcgctttgctgtttccaccaggcaattgttccctgatcagcaatacgatcaggctggttacgcaaatcaaatttgtactttcgtccccgtgcaaccagttccgcgaacgttggcgggttgtgtggatcatcaacaaacggaacgtatgagagttcgatcaccttcccgttcggggaagggccaaccgtttcataatcccatacgtaatctacgggtaaatgactcatgccgtcctctgcttgatatattccataaaacaagccagcgccagcgcaacttctgggttgatgtcgatggtttcaaactctttgctttgcaaagtcatcataccgaactgacgcagaccggaattgtagatcgccttttccagacgggtagcatgatctacagcatcgaaaaattcatacagaatatcataatcaatgtgtaaagggatctcgattctgggtatcttcgaaatcaggtcagcaattgcttccgcgtggaggcgagggatctggatagatatatcttttttcatgatattagtgtccatatgtctttatcttcacgaatgtttcgtgccattcgaaggatcagcacgataacgccatattcatcataagtcagttcaatttcttttgcaataggagaccatgaataacttggcccgttcggagaatacagaacatcgttagatttttcaatgaagcgcaaacggtgaataacttcttgcggatctgctgcgctatacatcccgaacatattgaacgcatgtgggtctttttctcgaattttatcgagtgcttccagaattcggggaatgtcttttacaaggataatcaatttcataataacctcaaaaggggcaaagccccttatacataatcaacggtgtaacgtgcgcgggttactcccacatagattaactgcttacacagatcgtaatctgcgaacgcatacgcatcgcgcgtgtacatgtacgcatggtcatacgtgctcccctgcgatttgtggtacgtacaaaccggaagaggcttaacatcctggaacttgtttttaatcgcccagaacgaatgccacggggctttatagcctgtttgctgcttgatgcgcttataagtgctcgcaacgtaggccagatagttgcccagacggtctttcatcaccggatcaacaacaacttgaatctgtgcttcggtttcctcttcgagcgataccgttttcaggagatagaattcaagttcgatcttctcgtcgcacttctccgccttgataacttcccgacgcgggatgatttctaagactcggattttttcgttgttattatacacaatctcggtaaagatctgcccgttcaaccgcatttcctgaactaacggttcctgcatcacgatcacttcatcgagaatgaaaggttctgttgttttgtacaggtgtttacggatcgttgcgttcagcttgtccacgttgtcgttagtgtaagcgaacatgcggttctcgatcaagtcatccggcgttttgacacggcggaaatactgacggaggaagtcaacagcgttagcatgttggaacacacccagatcaccgacagacatcggtttcagcatcttaccatcacgtacagcccgtgaaacctgaataatcgggttcccttctgcctgacgcatgattttatccatacggatgacatcaaagatttcttcatcaaagaacggggagagttcaacgcgtccatcggcgtttaccggacggatctgatctttatcacccagtcccaaaataacagcgttgcttggaatactgcgccggatgattcggaacagatccatatcaaccattgagacttcttcaacaacgaacacgcgacaggtagacagatcaggcgctttctttcctttctgctgttcgaacacacgcagttcttcgttagtcacagggctaatcttcaatgcagaatgaatcgttgttgcgtccattccggtagccgctgctaacacgtttttagcctggtgtgttggggcagttaaccaaataccgctaatccccaaccctttcagagtgttaaagacaaacttaaccagtgttgttttaccaacaccagggccacccgtaatagttgtatgaatggcgttctggatgttgtggatcacgcgatcatgcgcggacttctgatcgtcgctcagatcatcaaatgttaactcgctcataatttgagtaataccccttgaattttcgaattctcaataaaccaacgcatctcttttttctgttcttcggttgctggtagttgctcggttttgcggaagaaactgaaacgcggttcgtccggcgtgtagttcagtttggtttcgtagcacttgcggataaaatctaatttatcttttgcaagttgcggtgatgcaaacagttccggcgttttcccgttttcaacgtgtggaatagtaaagccgtctttgtctttcgtaacaatgatatagtatttgtcaatcattttcgcccctcatagatgacgtagaaaaaacctataacccatagcaatgataatactatcaaagcggcttttctgtcaacaccgttaacgtggaaaacgcaccatccaaagagatacgttatcaccgcgcaaacgatataagacaaagcaaatacggcatgtagcgcggtgagttccattagtagttgttagcccaacgacgcaggttttccgcctgtttcagagcatacagcttgtagatggtttccgcatccagtcccagcgcgaggaacttacacatgaagaagtgccactggtcaatcagttcaaacatgatttccagcttgtcttcttctttcatttctgcgaatacctggctacgcagttcctggtgatttgctttccacggtttccagacaccggaagccgcttttgcaccgcgagacataccgcccagagcggtgtaaagttcgcgggtttcgtctgcgatcgcatcatcttgcagtttcagccagtccaggatctcaccgcacgttttcagttcgttcggacgtggaacccaattcagggtatcagacaggctttgttgtgcatggttttgcaagtccagcatcttttgcagcgggtcaattccgttctgcaatgcattgcggtagaaaccttctaccatttccagatcatcggctttaaccaggtgcgcacagctattaaacacaggagttttatcagtcatatcaatctcattttttcggtgatttgttccacgacttaaaccgaagttttgccgtgagtccagaaacagtattatctttcaaatactgcatgatttcaagtttagttgcgccgtccgtttttatcatttcgttgatatcttttgacggccacgggcatttgtcccacaacacaaccttttcgccagcctcaattaattttaaaaggcggtgagtagtatcagggtgtctcgcttcattgtcaagaacccagacacgcatatttttatacggaacgtcagacagcgccatttgtccgcccgtaatcgcaccagcattatctacaaacaggctatccagcggcccttcaagcaggtagacaggtttcaacggatcgatggtatcttgaccataaactttcgttgagtgttcacacgctttgattgtcatgtattttgcgttggcattgtcacgtaaggcacgtccctggaatgactcgattttacccttttcatcaaagatagggatcaccaaacgcggttcatccttcggtaaagggtatgcgtccgcattcacagagttaaccaggtgttgccattgacgcgtaaaccagaggcggtcatatttgtctttaggtatgtgacgacctgcaacatacttaacgatagggtgattttctggcaacgtgtccagacgttcgcagaactgcaattcaggaatatatttcttttcttccttcggcggttcttcgtgcgtctgttttaaatctttacgatccttgaaagattccatcaaatacgcggtataatcatccgggtaatagtctttcagaaacacagaaaacggcttgctgtagttgcagttaaaacaaccacacatcatgtgtgtgcctcgttttgacgggaatatccagaaacgttttttgtgcttatccttcatggagtcgccacaaatcggacaacgggaatggatactgaattctccaccccgtcgaacgatttcgctttgtggtaatgatcccatgatacgagttgcgaactctatatcaagatacatgtttacctctatcggctaacttctttctctgtgccgtctaaagtgattttccattcatagaatatcttataaaacggataaggtctaggaatatcaacacccgatgatgtttttctttcgttcgtgtacacgatcgctgtgtcgctcatgtacttgatacggataggaaaccaggtgtaattgttcgcagtaacccagatccgataattcaatggcggtaatggtttcattcttcactcttcatgattttacgtttgcgtttatgcggacgtgtagaacccagaaccttcggccctttgttcgtgatcgcgcctgtagtcacacccgaagcaatattatccacacttccgcctgaatcacctgcaaccatttcttcgttgagtctttcgcgaagttctgggaggttcatcatgatttcttcgtgatcttgctcggtcaggttccagcggctccgtaacgagtcataagcacttgtaaggttcatgaacccagacatataaggaaccgcgtttaaacggcgcttgatgtgtctcacagagcgatggaatggggaatatgcttccagttcttccttcgttttcgggtttttcaatacttccccttgaccgtcgatgatacccagcttgtaagccgtccattcagtccagggctttttcagtaggcgaatcattcgcacactgtaggttaaatccatgtttttgattaattgatcgctcatagtctttactctattgtgaaagtgaaaaggttttgcgcgggttctggctccggttcggggaattccatacagacaacttcacacatcggtttcacgcctttccattcttccagataatatccggtatcaatgccgcaacctggttgcatttcaaggccagtttcatcaagaaactttttgcatttcgatgttgtcgttgattcgtcctgttggaaataacgccgtccagagtaacgaaaattcgcggacatctgcgggagaatgaacgtacccgcacgggcaatctgtgaagcacgttcaatcactttatattcaaattccgcgcccgtatacttacccttaaaattggatgtctttatcttgccgaaaggaggattgctgatcgccatatcaaacagagtatcaaactccgtcgttaacgcgtctgcgttaatccaggtcgcttccggtacgatacgcttacccaacttatagtatgtatggtttaactcaacacagacgatttcacgcggtttggcgtacatcatcatatgaatcatcgcgaaggatagtccaccgatacccgcgcacaggtcaacaacgcttccactggtacaagcatcaatagtgaaatcgcgagcaagtccgatcggggtaaagaatgcacccagttcagagttattcgtaaatgcaccttcatggaagttttcgataatgaataatttttcgtcgtaggttagcgccttgtcagactccaccagatccattatcttgttgtgttgcttcgtttccgctttcgttaactttgccattgtcccagctatacagtaatgttgattcattagggtagaattcccacccgtccacgtatccggtttcccagtcagtagtttgttcaaaaccacagatccattcgtacacacctggcggcagttctacggaatcaggaagcccgatatcttccgcactgcgtccacactcaaaaaatgcatcgtgaatgaacggacgagataataccgtaacataaccttcatcgtcaacagctacgatccagcgcgaactgtgaggactatcgaacttcggttcttcttcgtctgcatcagcttttatttcagccttacaaaaatctaaattcatcatttcactaaaccttctttaacgccctctttcatggctttcagaacaccgataaaagcgtctttgccaccgatagcgccgatgataagcatcaggacaccaacacaacccgccaaaccgattctgaacaggttccatgcaaacgggatagccagaagcaccaaccacgggaacggaaatcccataagtgcgtttagaaccagtaagataaaagcgattgcaagtttcatgatgtcctcctttgtttgtttagaataaggtatcacctttcgtgaaggattgcaatacctatagatacaaaaaagcccctttcggggcttaatttttatgctttgttgataagataccgaagaacgtttttggcctgaacttcgttacagcagagtttgaattctgggtcgattgggaggaagccccagaggaaatcaacgctaccttcaacatctgctttcccacttttcagcatttcaaccagcaaacctctgtttactacgctgttcactactgcatcgaaataacccgcgctgaaatccagttctgggttcatcacttcgtcgtatgggttgttcagtaagttcatttggtatctcctttaatccgtttcgttgtctacgggagtcatattatcacaatcataactcccgtcaacccctaatcaggattattttgcgttttttgcaatccagagagtcagtttagggaatacatttgccattgccaccacaaacagcacccagaaagccagcttaatcacaccgatcacgatcagaggtgcaaacacaagccaccatgaagcatttgccataaccccgattgctgccagtttcagagacaggaggatcaggaacacaataacgagaatctttttcatttcactatacctttggagggggccgaagccccgttaaaattgaatgtctgtactgtttgctacttcggctaacttactgcttcggttagtctcggcttgttttaccatagcaccttgtgcttcttcaagcgttttcggcatctgacgacctttataatcagattggaacccgatatcgctgttgtcggtatccatccagcgttgattacccttgcgcacttcgagtttgaagtggttaaagtggttcttatcgccgtaacgggatttgatctgcttgaacaactgcaatccctgatcagctaactcgtcggtctcaatcacagctaacataaagtcagcggtagctggaagaccagcagattcggcaacgtcgcccatgctgatatcagaagcatcccacgcggcgcgggtagtctgcgcaccagtccacattacggtattcgtttcaacagccaaaccgcgaagttcttcggcaatcgctttaaccaggatgtatgtgttttccgccccgcgtacacgggtagaagcacagatccccaggtagtcaacaataatcacatcaggtacgaaactcttcttcaatttaagctctttaatcagcgctttgaagtggttcgcgttcgcccctgctgttgggtattgcttaacgattaaacgcccgaccttcgactgtttgaggcgttccatacggttcttatagtccgcataggtgatgtttccgttgtcgatatcgtccatcgcaacatcaagcaggttagcgtcaatacgtttagaacaaacgtgttcagccatttccatactgatatacaggacgtttttacctgattgcaggtaatcagcagcgagagaacaaagccccagagatttaccaacgttaacaccagccattaagatgttcaatgttccacgttctgcgccgcctttagtaatggcgttcaggatcgggatattgaaagcaatcttcatcgctttggactggtaaagcatccagcgtttttcatagtcttcgaagtaatcatgaccgaccgaactatcgaagctaatcgctaacgcttccgccatgatgtcagggattgccccaacgtcagggattttgttgttgcgttcgccagcaggtttttcagcattcgcctggatctcaattgcacgggacagagcgcgatacattgccttgtcacgacaataggtttccgtttctttcatcaaccattccagatcttccggcgcatttttcatgctgcggatcatctttttggtatcttcgtagactacatcactcaggctctttttgtccagagctacttctaaagcagtttgtgaaggaatgctgttgaattcctgtacgtgcttatccatcaaatcaaagagaatctgcgcgttcccttcgaaatattcacggcgtaaatggggccacgcctgaacaaaatacgtaccattaaaaaccagatttgaaaatattgtttcgacgatcattattacctcttaaaccagattagcgaacatctgaaagaaattatacagctttactttcaacgccgcccataaggtcttttcaggctttgggagattgggcttgatctgcgcgtagattgcatcgtgaaccagcggaatcagtttttctttgtcttcgtccggcgtactaaattcgactttcaggccgttatcccaatacaccttatggatgtacactaagtgtgcaacatcgttttcatcgttgatcaacagttcttgaataacgtcctgcattgcttcatcaagaatgttttttgttttttgttcaatgtccatgattcacctattaaaagggggcaaagcccccagttgtttattactcttctgacatatccacatcatcagggatatcgtcatcgagatcaaatttatttgacggttctacttcatcgtcagaataaagatcttcgagtgctgccccgtcagtgatctctttgtcaggaatacggtacttatcctgaatagcatcaaggaatggttggtgagtgaacagaggtttccagaactcaatagagttggtttccgattcacgccatttcttttcttccagttcaagttcgcctgtttccgtgttcaggaacgcacgaccgcgccagcctttcgttggagtctgaacgaagttcatttccatagccagatccagaagaccagagaacatactgataccgccctcataggtaacatgaagcgggaatttggatttctctttcacgaaacgagatttctcgatgttcatgatgaagtcataaccgacaacttccgtaccttctttcacctgctgtttgcccaggatgatcgcggtgtctgcggaatacatcagaccagtaccaccggaaatgactttcttgctgtacatttcttgtgtgtcgtatgtgtgacagatacacaccattggaatatccagatccgccaggtaaggcgtaaccatacggaacatacctttaagtgctttagcgcgggtcatgtcctgtttgtcgttgtcagacagggcatcagccagttcttttttactcgcggtgttgcctacagagtccacgaaaatgatcactttgtcgccacgttccagcgcgttaagctggctcacaacgtcatttcgaagttgctcaactgtcgtgatacgagtatacaccacacgatctgggtcaacgcccattgatttcaggtaagacttagttacgcctttctctgaatcgtagaacagacacacagcatcctcattcgctttgaggtacgccgcaaccgtcaccagccccagattcgatttaaagtgttttgacgggccagcaaacagagttaagccggaagtcagaccaccatcgaaagcgccggacagcgccaggttcaggatcggtacacgggttcgagttttggtgatgttattgaaaacatcgctttcagatagaattgacgcagattgactattcgagtttttgatcagttttttcaggagtgctttattagacatttatttttccggtttatatacacgcataatattttcctcacaaatttatataaatggggcatttctgccccgtcaggtcttaccagtcatcaccaaacagagtgttcagggatgcgcgtttttcgtaatcaattttacatgcttccgtgatgttttgcaacgggctaatcacatgtttttcaaataatccgccgtagtctacccacttcaaaatatcttcttcgatctcagttggtaaacgcgtaccggattgccatgcaatgcaatcagcttgccacgggtttttatctcgcaacggcagaaccataaccttttcaccttccataatcggggtgattccttgaataccctttgtatggcggttgaagaacagaacgcctttgatgtggtttggtgtccctttgattgggtatccaaaatcatcacgatattttgagatattgttagcagatgatacaccagctatttctcggtagtcaagtgccttatactcttcctcaaatactttgaagtgttcgtgtaaggattcttcaccttcttgcaggatgcgacggatcgcttctttcaagaactttttaaccgctgtcggtgtactactgcgctgggtttccattcccatgatctttaatttaggcttctcgtaacgggttccttcggagtcccacacgttagccgcatatcgtttctttgccgtccagaaactacccagacctttcgatcccagtggtggcccagaaatgatttcgcgatccataaacatcagatgttcgacgttgttcatgtactcacacagttcgcggtagcccttatcaatgataggttccatgcgttctttactgaacttatccaggaaatcaacccaatggttgttatccctgaacttgctttcaccgccgactttcgcgatcacgttatccatacaaacataaatggagtcggtgtcacagtagcgcacgtatgcgtaatccgtggtgttgcacagttcgttaaggtattcgttaaccttacgttcaatccactgaatagccaactgaccgaacatggtgatcgcgcttgcgtttcgaatatcgaagtaccggaagtgttcattacccaacgcaccataaagggagttgatactgattttacggttaagctgtgcggtgtttgcttgtgcgatcttcttctcacaaactttcttcacggctttaagcatttgcttagacagcgttttcagtacagcttttgattcatcactgaaatcttcgtagaactcgaaatcagggttgatcatttgattgtgcgcgtccgtcaggtgttcaagttcgtgcttaatcagttcgagatttcgctcacccgccatcattcgttttttccacgtcttacgctgatcaaatactttcttgatctcgaccggaatcacgcctttaacatcgcgtcggaacatccacccgttaggagagcagctaaattcatcgctagggcgcggcgcagtcttattgatgtattcgtgcatcggacgcactgcaaagctgttagcgattgtctcagggcttatattcacctgtcggatgatagatggatacagactggttaagtcgaacgatacaatgtaacggtatggagcgacaacaggatctttaacgtatgcaccatcatactgcgttttcgtgtggcgtttattttctgggattactttcttctcttcacgcagagagttgtaaatgatcgcgtcccacgttttaagcggagacataaccccagggaagtttattttcgcatagtacgctacagacagaaccagttcgataaagttgcgtttcccgtcgatatccaacacgcggataacgtcaacgatgttatacgtgatgtatttctggtgatccgcttgacgcagttcagacagtgaaccttcgtaatcaactttgtttttgcctgtttcgaactcagcgattgcgcccagagcgtaagacggttgcggggtgaaactgaatttcttatagagatccattccatccatttgagaaacgccgtaaatctcgtatcccagttgttcattcccataatggtcggttgttgtcttcgcagtcactttcccgaacgggctgaaatgacgaacaacgttttgcccgaagatgttcaggtaacgggtgatgatatacgcgatatcgaatttgttcgagttccagcccgtaacaataacaggtgtccgctctttccagtctttgatataagccgacatcagcgacttttcggtctggaatgaacggtaaacaattttcttcaaatcttcttcgctgatctctttttcggtatcaactttcgacgctacccactcgtctaacccgccctcgaccagatcatacacaaagaatttatcttcaacgctgtcatagtgggtgattgcgtcgatagcatattttgcttcgcgtggatcagggaattcaggcgcggtaacttcgatatcaagtgaagcaatgcggatcttgtcgcgatcgtattcgatttcctttctgtaggaatcggagatatacgccagcctgaaatcatccatgcctagcgcttccatgcctacatctttcattcgctgcatccagttttttgcttccttgatgctttcgaagttctttttgatgcaggtcttgccgtaaatgtcgcgatatggcgagtctacacccgccatagcgtgttgaaacattgtaggcgcatattttgttttgcgaacctgttcgcgtccctcagagtcaatgaagcgctcgtagatgtgatcgcccatttgctcaacggatagataaaattcattcattacggttttctttctccgtgtttaatcgtgacaggaatgataccccagccagcttgatcagatcaagcgagcgttgcgctaatttgtgatagcgttgggtgtcaggccgatttagttgttcaaccagcacggtatattcttccatgatgcgggtatagaacttagggaagtgatcccgcgcgtatgcgtaggtgcgcagatcagagagattgcaagtaagagacagtttgatgtcttcgctatgcagacggttgatcaagtgatcaccggattcaatagctttgatgatttcttcaatacgaattttcataatttagtcctcacaagtggtgtacaaccaatataacaaagcccctgcatttctgcaagggcttttgattaatgtccgatccggtacttgtatttcaaagtccattcagctttttgtgcgtgagtcaatacgcggaagttgttctcttcggagaatttcagatccggcgtaaggatggaaaccataccccactcttccagaagtcgcgcaatgttattgcggcgcagttcgtcatcttcggtcatgtcaacctggcgaccgtccagcttcaacagttctttgaagtgtacgataaaataacgcccttgtttctgtaggatgtggcaagactgccacagcattttctttttgttatttgcgatcccgatacgggtcagcgtttcgcgaattttcaggaaactgtcatcgctggacagtttaatttcgagcatgttcatacatcaccatttctttattagttgttcaacctttttctggtcggttttatttttcacaacatcagccaacacagataaagcaactttcatatttttccgcttccactcgtccagtttttcaagctgtttgagttcttcgtaatattccattgctatacgtgtatttacaccgtatcgtttttggagaacatgaaggataactttcatttcgttatcttcggtgagtttagcccacgccccgaaccgcttacctttgcgcaccgtatgcaggtaataatcaaagtgcgcctggtctggtaaaccggaaccgatcatattcatcgtgtatgcaggtatcagcgtttcgatatgctggctcattgcattgtcgatgaaaaacttatcgtatgaatcaagggcagagatccgtaatggtgtcttcccgttgttcagttcttcgagcaccataaacaaggtgttttccttgtctttggtgtactctttcacaagttcttcgatcttgtcccagtctttagaacgccaggccgcttcatgttcgttcagttcttcttcatcgagaaaagcagccagtgacatttttaagcctcccacgcgagggtaagcattaagcccatgaacaggtattgcaggtgaatctctttgttcactgccagcccgtactgtgcgttgttttcgcctactgcctgaatgagtgcaaccttagattcgttggtgacgatcgggtataccgcatccagaagtttagccaggaaagtttcatactcaggcgcgtacttgattgcttcggctcgcagtgctttgaagttcttcgctttaagcccctcaatcactggtgtgatgtccgaaccaacaatctcagacagaataccagcatcaattttgccacgcttagaatagaacccaagagctttaacgatggatcgcgcgtctgggtagtgcttcttaacgaatccggcgatcacctgctggtcatattcgattttctcgatttcgaggataccgaaacaacgtttgatcatttgcttcatcagttcaacgcgttcttccttcgacggggaaccgaacttgactaccggacagcgggagatcagcgcagggtgaatcccgttgatgttgttcgcggtaatgataacagtaacgttcttgctgtacgcttcgataaagctacgcatgtgcttctgtgcttctgccatgccagggcgatcgaattcgtcaatcagaatgattttaccgcctttcttctgcgtcatagaggacgcgtaacgatccagttcgttacggatgaagttcacaccacaatcggaaccgttgacaaacatcacttccgcatcaacttcgttagccagaaccagcgccagcgttgttttacccgtacctggggaatcagaaaccagagtcatgttgtcgatgcgtccagacttgatgaagccgcgcatcgtcgctttatcagcagcagggagaatgcattcatcgatcgtcgtcgggcgatagcgctgatcccatgcgaattcttcgggagactgggagattttgccgtatttggtttcgattaactgtacgttttcactaagttccataatattaccttcaattgattatcaaaaaggggcttaacgccccttgtgtactactttgtttatcttacttgaactggctggttgcttcaagtaccactacatacgcaacgccgttttcggacgagaatttcgcagcgccgcgagaagagatttcaactttgtaatcgctgttgatgaactgcatgttgtcaatcttcatatcgaagttgaacatgttatcaccttcgtaatcgcccacttctacagagaaggttgactgactttctttacttttcgcggtgattaccagcttgccgttgattggctcaacagacaggtcggtcagtttcatcatgcgtgacgctttgatcagtttttcgaaatcgttcgcgctaatctggaaaatcagatccgcaactggcatttccagacgcttcttaggctgtacgattgtggttggatcgcttgaacgctcaacgattttcattttctcgccacgaatgacgatttcgccagtggacaggtcgtgagttacttcggcatcagtgcctacaacgttcagcatgttcaggaatgagttcagatcgtagatacctacatcttcgtcaattacgtcagaaattgttgcttctgcgtaaactacgctgttgatggatttcgtcataatgaacgaaccctttttcagcattacagacgggttgatctgggagaagtttttcaggatgtcgatcgtttgtttagagaatttcatattcaacctatagttttcaattaggcaaaagtgccgttaatcagggattctacaacgcgatccgccgcattgtcaaggaattctttgcttttggactcgttgattttcgtacccgcttcgcgagcgtcgtgaatcagtccggtatgtactgcgcttactgcttcgtcgatccgtttgtaatgctcaaagcgttcagcttgaggcatcgcacggaaaatctctttgatgttttccggcactttacctacccaggatttgcgaacgttgttcagatgcgctacatatacgttttgttctaaattcatatctacctcaaactttcaaattgggggctttcgcccccgtaagcattacagatccagcagtttatccaggtcgtcatcaccggaaccaccttccaggtcaaacggaggggtgttgtcatcttccggtacgcttccgcctacgttcagttgacttacgccaccagattctttagcacctttggactggttgccattatcgaagtttttcagttcgttgtcaaatgagttcagttctgaatccagatccgcaccagcgcttgcgccagcacccattgcagcaccaccgaatactttggtgaacttcgcggtcagttccgcagttggtttgaactggtctggagcagtgattggacgcagatcgctcataccttcgaagatttctttctgacgcgcttcgtcttcgatgcctttgattgggccaggaacaccaaatttgctgtcgtcgtagttaggccagtcgcctactttcttcgcggtcagggtgaagttagcaccaccaaacggacaagttacagcgatacctggttcatccagatcagggttgccagcgatagcagcggtgatcttatccatgattttcttgccgaaacggaacttaaacactttaccttcgttttccggcgctttcggatctttaacgaccagaatgttagcccagaaggattgtttacgcccaatcatacccagcagtttatcagcttcgccgcctttattggctttggctttttcgaacagatcgttgtcagagatatactgacatacaggacaaccatcataatcgccgtgggtagacggacagttttcaatgaaccactgattgttctttttgaacgagtgattcaccaggcgaacaaacgccagttcgtcatcagagcggttaggcaggaagcgaatagtcgcagaaccgtttttctgtgcatccagagtgagtttccactctttttcatctttctggaagccggaggaacctttcagagcggcgacttgttcttgcagtttggttggatcttgacgtttaaagaatgacatatgttatttctcgtttaagttaattaaagtttgtttcattaagtttcggtattttacgatttcttcgttactgatttcaactaattttctgtatgcgtttagttttttactaaattcattccagacgaaatccgttgcgatttcatcgtgtttatttatgatgtctaaaaacgagtcgaggatcaagaatgattcataagaaatcaccccagactgtacgagtttgctgatatacgaggttgatgatttgacgctatacttaaacaccgttgagaggggaatacctttcatgcgggaaaattcatacaggttttttacatcgtccacgaaaatattatcaattcgcctcaacttgcctatgtattgacgataaaacacgatcgtatcttcgtctacatccccgacccagaagtcggggttagctaccatattgcagagtagtataagatatatttctttgaatgtaaacctttcggctaactttgcgaaaaaatatctatcctttctcttttggaacgcttgttcagtgatctttatttcccatttgtacttgatcgcgtcatacttcccagcaaagtgatttttcatcaccagatacagtttgtataccgcgatcggtttcaaacgggaattagcgtctgaactgtcaaacggggttttaaatttcacatgaaatcatccagtgtttgcgtcgtcgcgtggtctttagccacagaaggacgcagcagattgtttttaatggcttcgtcgctaatcttgtcgatgatcgctttcggtactgttttggacagcatagcataatcaatgctgttttcgtccatccattgtaacgtagcttccatgtaggttgccccctcagaggcaaccagattttcgatatacaagccgacttcggttttgtttccgatttcgctcatattacgccttatcgatcacatcgtacagttcgataagttcgttgttctgttcttcgaacgcggtacgtgcctgttcgtgatacagtttgaacagcttgccgaaggttttaccgtcgataccataatccgttttcgctttggatttgatgtctttgaaagaaccctggaaatgttcgatctgagttttcacgttcgacgcttctttgatcagttctttaaccgctttagcgatgtctgggttttcttgcagtaattctacactcattttgttacctcaaaagtcacttagtttttcatacatacgggtgagtttgcattccatgaagtatttctccatttttgctttgttcccgatttttggagcattatacgcttcttcgattgccgttgcaacatctttcggaataaaatcaaagtcgcgaagttcttcgttttctctgtatcggatcgcccactcttcgggcatacccacggtcggatcgtccgcttccagccaggcttcgagttcagcagccctgatttgtggggcgcgttctccttcaaccttcgtaacaatatagtcatttcgcattttaatgcaagcgatactatcttttttatcgcccttgatgatcttcatgcgcaaatcgttacgaggtgaaccatatttcggtgtaacccatttcttttgggttggcgaccactgacgcacaccctgatatttttgaagggctgcaaagtcaccatcagcagaaacgatcaggacacgtttaccttcggataccgctttacgcgtcaccacaccgatcacgtcatcggcttctgcgaagtcaacgcggatacctttgtacggtaaattagcacggatttcatcgtatgtcgggtgaaggaaaccattcaggcgatcccagtcccaatcagatgcttcttgttccatttttcgtttctttttgtagtaccaggctttacttctgcgccaatacttgttatcatcaaaggctagaacaatttcagggtactcgcctttgaatttaaccacattgtgacgaatggtgtcaagcactatgtgacgaacaatttgttggttgatgtcattctggtctttcggcttgaagttgttcatcaacgttgctaccgaaaggtttgaaatatctatacacatcacatcaacaggatcatcgtcattgctcattaagctgttcaggttgaacatacttgcaaatgaagacatttcaatacctcgttgttgttgaatgaaactgattatagtgatcactttttcaaagtcaatagatcatttcaaaaatctgagcgaagcgaaggacacgaacgtagtgagtgtctatgtactgaatgtacgttttaatatttttatattttatatatagagaaaacagtacatttccgtatactttttaaccaatttaactatccgtttcgcttcgctcacggaagcgcttcgcgctgattttattaaataatatagattggaagtaggtttgaaacacctgattcaatcggctataatgaatgtattcaatttggagaatataatgactacaaagatttatgcagataatgataagctgtatccagttatgtgtaagtggaaacagcaaatccgtgaaactggtgatcgtaagatgccggatgaactcggtattgcgattatgaacattgctcacggtttggcacgtcgatacaacttcaaccgttattccgaagactggaaaatggatatgatcgacgatggaatttcggcaacgatttccggccttcataactttgatgaaaccaaatatacaaacgtctacggttacatcaacaaggcttgctggcaagcgtttgtaactcgtattctctacgagaagaaagagaacgcgaagaaatacaaatacttcctggaacatgtctatgacagcgatgatactgatatgaccacgatagccgatgaaactttcattcaggatatccatgacaaacttaatcagtatgaagagtccgcgaaaaaacccaaagataaaatcgaggttgtggacgaatcgccaacattggaaatgtttctatgaaaattaaaattgacctgaacaaaattttagcagatgctaacgacgaaattgatctgcttccttaccttgtgaaattagagttgcagaacgtcggggttccgattatcatcgaccctacagatgtacgagatccagacttccagatagcagaaggtcgtctggactatgtaataaacgccgaaacaatgatcatggagatcacctactatgaacgtgcagcatgaagtaatcgacgaagtacaccaaaaatcagcgctggatcttcgtgaagaagaactggaatccatcaagggtacacgcattgaacaggaagccctacgcaaagcacaaaagttcatgcggaagaacaaagcggaatggaagcgactgcataaacacgcagagaacgcactcttcgaaggtaacaaagagcagtacgtatacgcgatcaaaaagatgcgtgatatgctcaagcaaccatacaacgatgaactgattgaaacgatgtggatcacttcgaaccagcagttgaaagacctgttcatcatggcttctgaaaaatacggcaaataaaccccttcgggggttttgaggtttatatgaactatgttttaattggggatacccatgccggacttcgccaggataacccctggaacgaagaaaacctgtatacggtattcaaacagatcgtagagtattgcaaagaacacgggatcacgcgcggcttccatgctggcgacttcttcgacgttcgaaaagcaaccacacaaacgacaatgaattttgttcgtgaaaagctggttcctcttctgattgaggcggggatcactctggatgttcttgtcggcaaccacgattgtcaatttaaggacaaaatacgccccaacgcgccacgcgagatactaagtcaatacgaatgctttaatgtcatcgacgaaccgaccacggttgatttaggtggcggaaattcgattgacctgatcccgtggatttgtcaggaaaacagccagcgtatttttgactacatcaaacaatcgaaagctaacttttgtttgggacacttcgaactgtctggttactatttctacaagaacagcaaagccgatcatgggctggaacctgatttcttgaagaagtacgatcgtgtttactctggacactatcaccacgctaacgagggtgataacgtgttttatatcggtacgcctctgactatgagcgcaaacgacgaagacgaaacacgcggattctatgtgttcacgggcaagcctgaattgactttcatcgctaaccctgtgtgtcaccatcgccggatcatgtatccagcacagaaagatgttgatctcgaacagttccgcaactgcgcggtgcgtctgattgtcagtgaaattgatcaggggcttgcaaagttccaaaccaaaattgaagaaattgcctatgaaatcaatatcatagacaaagttcaaacagattcggatgtcgataccgactttgaaatcaaaaccgttcgtggccttatcactgagtatatcgccaacatgcagatcaccgacgatgaaaaagaggaagtgaataagctgatcagcgaactatacgcggaggtgtcaagtgcatagccgttatgatgaatatttcggggaaaatccccgatattctcacctgttgcgtatgttgggaatgaaacacatcatttccacatccgacgaagcaggggaaaccagcgcagtttgtttgaccatcatgaagggtgcatggcattcatcacgaacatggtcaatattcatgcttgatacactggacgacgatactctatcatatagtattgattcatcagttgttcaaatgatcactgaattatgtgaacggattttaaatgaaactaaacttcaaaaaaattaagtatcaaaatattctgtcggttgggaacaccccgatcgaactggaatttgatacggcaaagaaaaccctgatcacggggaaaaacggtggcggtaaatcgacactgatcgaggcgttaacctatgccctgttcggtaagtcattccgcgatctaaaagtcgggcagttggtgaacagcgtcaacaaaaagaaatgcctggttgaactggaaatcgaatacgggaaagactcgtacaaagtggtgcgcggacaaaagccgaaggtattcgagatctggaagaacggcgagaagttgccggaagactccgcagcgggtgattatcaggcacagcttgaatctatgctgaacatcaaccttgtgggcttcaaacaggttatcgttctgggtacagcgggttacactccattcatggaactgaaaacccccgaacgccggaaactggttgaagatttgctgtctctgtccgtcatcagtgaaatggacaagttaaacaagtcatacattcgcggtgttaatcagcagttggatacactctcaatgcagggtaatcacatccagcagcagatcgcaacacaccagcgcttcattgacgaacagcgagcgaaagcaaaccagaacaacgcccgatacaaagagatctacgatagccacgtagaaaccgcaaagaacatcaaagcacagcttatgcagttgcaagcggagattgcggaatcggtgatcactggagaagaccggacggaagatatcaacaaactccgtgacggttattctcggctctcaatgactgtagaacagtttaaaaagctggaggtgatgtatcagaaaggcggtgagtgtccggcctgtaagcaagcgattaaacccactcctgagcgtatggcggagatcgcagagaacatcaaagcgggtacacagcgtttaaccctgatcaaaaccaaacaggacgagttacaagggatcatgaatgacttgcttcaacagcaacgcgcactcaatgccctgaaaaccaaatatgaagccctgaaaggtacactgcaaaacgaagttgccaacgctaaacgcgcacaggcgatcatggaacaggcaagcgcggaagtagtcattgatgaagaacccgtgaagcagttgcaacagcaggaagcagaactgaacgaaaaacgacaaggctacgtcaaggaaaaatatattcgtggtattgttacggatatgttgaaagattccggcgttaaagcgagcatcgttaagcgttatattccgtacttcaacaaacagatagcatattatctggatctgttgggtgctgattatcagttcactttagatgacgagttcaacgaatcgatcaaatcactggggcgcgatgatttcagttatgcgtcattcagtcaaggcgaacgcgctcgcatcaacttgtctattctgttcacatggcgtgacgtgacaagtaaagtatcaggcgtggatctgtctctgctggtacttgatgaatgtttcgacggcccccttgacaaagacggctcttttgctgtaaaaggattgcttgatggtgttaacgggaatttgattgtgataagtcatcaggatttagatccagaagattttgaccgacacatcgttatgtcgaaggtcggtcgattctcgaagatggaaatcaagaagtcttaaacttgcagttgtcaaaatgccatcgtttcatattggtggcatcaccaactttagcgcaatgggggcaagttaattgctcccttttcttttgtgtttttctgtctgggttctgagtacaatatggaatatgactgttcaagtaatgcactgtcgattctgtaccgcaatgaggacaagaaccgcgctccgatactacgttgctgtttttatgtgctcgcatgactcctgcaaatgcattcactttcccttcattgcctggcttgtgcttgcagttgtcgaagtgccagcggttcatattacctactaagccggacgtattgcaatgaggacacgtaaccctgttctgttgaagtttggcctgtctcatgcgtaagcgtgtctcttcgctgaactctttttgtttctgggcttcaagtgctttctctttcaaccatccatagcggcggtttgctgtacgcgcagacgatcgagaagtaccgactgtaagcatgttagcagcataaattagtttatggttgcctggatacatcttaactaatagcagatgtgctatgaagtgttgacgtgctgacagttcaaccagattttcgggatcgtccgatcctcccatacattttggaacgatgtgatgtttctctttgtattctgcatccgttccggtagtcatgagttgttcgtaaatcttatgataattcatgatgataaatcctgtttgatagtccgctagatacccctatttaggaacatgattatgttagaaagagagtttgaactgataacaaccccagaaattgagaggttttatctccacaacgagttacacgaaacgaaacatgtagttacaatggcagatgttgaggaagcattcaaggataaccccattgaattgacccgcatcaagaacaataaatcttcggtgtggttcctcgaaaaaatctattgacagcaaaacataaataccttaaagttgcccgtgtactgagttacatgggcttttattttgaggaacggaaaatgattaacgaacaaatgtcacacagcgaagcattgaagattttgggcgctactggcgacgaatctaaagctgaactgtcaaaactctttaaacgtgcttctctgcgcaatcaccccgatcgtggtggtagcactgaactcatgcagaaaatcaaccaggcgtatgacgttgtaaccaaaacaaacagcgctggtaaaacttacagtgatgttcgcgcagaacacgcagcaaacaaaaaagcatgggaagaaaaatttgcagcgtatttcgtggttgcgaaaaactatttcagcacgaaattcaacgcgcaagagttcgcggaatacttcacgaaattcaccggacaaccaacaacctatactcagtcaatcagcgaagttcgcggtcatactgttcacgcaacctatcgtttcacttctggtgatgcgttctttgacttctctttctcttgtcaaccgcctaacggtcaaggtttagcagcgccggacgcgtccgcactgggtagcgtatcagttaatactctggttctggttggtacgaagaaacacaaaatggcaagccgtgattaccaatggggcaagaacccagacaaaatcacgccggaaagcctgttccctactaagaaactggaatccatctttagcccgactaagaaggatctcaagttcaaacgcgcggactacatgacatcctttgcccgtatcctgggtgcgaaggttagcggtaacgatgttattgttgatgttggacactataaagttcacttctaccgtcacgtattcatgcgtaaaggcgcgtatgtgttccagtatgttgttgacccaactgtgaacaaattcaaacctgctgaacgtctgaaaggtactatgctggaagacgaagacggcgcgtgtttggatatgatcatcgacactttcaaagaaatgcagaaagtgaaaccagacgcaagcggcatcgcagcggtaatcgaccggatgaacgcagagtttgcagcggggcatcgttcagcatcttttgttaaacgtaccgcacagcaagcagcagcgccagcgccggaagagaaaccaaaacgcaccgttaaccgcatcaataaagatgactatttcaacgcactgaaacaggcgggggcaacattccgcagtaactacggtgagtttgataacggcgcgggtttgactttccacttcaaacgcgagatcagcaaccgtaaaggtttctggagtttcagcagctttgatttcatgcactccggtcagaaacatgttgaatggttgaaagatatcgacattgacgaggatagcaaaggcgcaagtatcggtttgttggttgataccctgaaacaacttcgtggtgttgctgactggtacacagcccgtaagatcctggaaggtatgcgtgataacttcaaggctggtaaattctccgcacctcatgtgaagaaagaagccgaacagaaacgcactgaaacgcaagctaaggacgagttaggcgcacagcctacgaaaccacaggcagcgaagaaagaatccccagcggttgataaggcgcatcaggcacagatggatcgtgagaaatcacagatgaatgcaaccattcgttctatgctctctgccctggttaaagccggacgcaaagacacaccggaagaaatcaaaaaagcagttgatgaagcaatcgctctttggcgcttgaaacactaactggttatgctataatgggaactgttgaaaagcagttcccttttttatgaggtgagtatgattattcaggtatcggttcagggcaacactctgacagtaacaaattccattatgaccgctatggctgcatgtcgtgatcatgtgatgtcaaaccctccggtaacggaaattctggaaattgatgtatgggaagacggtgtgatcgaagaatcctttggtttcactccgttagaggaagatttacgcaaaatggaacaatggctatggcaaactgtaccccaatgaaactaccaaaacacacaaccctgttaacccgcgaaaaacttcattcggttgaatggagtccgttagatgtgatggttttcgatctggaatccaaaatcattaacgcgcatgttaacggattgagtatcttttctgttgaatttgaaaagattcgcgggtacaatgaagcctgtaaagacaaattgcgcgtcatggttgaagctatgggctacatcgtgactattgaagacaacaaaatgtggatcgcgctatgagcaaagtaaaagcagttttcgccgttggtcatgatatgtacgaagtggactatgcgtttggttatgaacagggtttaccgtggggccactgcaaagaggatttgcagaacttcaaagcagaaaccgcagatagcgtcctgatcatgggtgcgaacacttttacttctcttcctggtaaattgccaggacgaattcactgcgttatgtctggttctggtagtttcctcaaaaccaaaaaaggcgatgttgctgattacgtcatccacggcggcgggttgtctgctgcaatcgacgtaatgaaagaaacgcatccagatcgtgatgtgtgtctcattggcggtaaggggttgcttctggaagcaatcaataatacactggttgacgaagtggttgtgacgcacatttacggacatcacactttcaatgcgccagcttttaaacgtgatgtttcgttcacggttcctgaattctgtgaagcggttctgaaatatgaactgactgatttcaaaattcagcagatcgaatcaaacgaacgcgtcagaaaaattatcgtcgatcgacatacgaaaaaggcataaaatgaaacaatatcttgatatcgtcaacacagttctaacacacggtacggaatcaaccgatcgtactggtgttggtacactgcgcatcttcgggatgcaagcacgttggaacctcgcagaaggtttcccagcgactaccagcaaacagctattcttcaaaccgtgtaagcatgaattacaatggttcctgtctggttctaccaacgtggaaacactgcgtaaaatgacgtggggtgaagatagcgataagcggacgatctgggacgataactacgaaaatcaggctaaagcgctgggttatacgcatggttatctggggccgatctacggacatcaatggcgttcgtttggtgaggaagggttttatgatggtgttgatcagattaagaaaatcatcgaacaactgaaatcaaccccagacgatcgcgggatcatcgtttctgcctggaacccgatggatctggatgatatggctttgcgtccgtgtcactgtttcttccagttcgtcgtaatcaacggcaaactgtctctacagtggtatcagcgttcagttgatgtcttcttagggttgccgttcaatatcgcctcctacgctctcctgacgcatattatcgctgatatttgcgggtatgaagttggcgatctggtttggactggtggtgatgtccatatctacaaaaacgcagtagaacaagcgaaagagttgttgaagccggaacgcgcaccgcttccacttccgaccctttatatgccgaaggtaaatagcttacttgatttggatcaagaattctttgactccatccatttgaaagactataatcaccacggctcgctaaaagcagctatggcagtataaacaaagggggcgaaagcccctttcttaacaaggtaagataatgagtgatattaaaacagtagtgaagtcttctggcgtaagtcaaacgttcgaaaaagaaaaactgttcaaagtccttaattgggcgagtattggaagaaatattgatgttaacgcattccttgaaagtgtcgttgacctgcttcgtgatggtatgactaccaaacagatccaggctgtagcgatcaagtatgcagcggatcgaatctccgcaaaagaacctgactggcagtatgtagcggctaacctcgaaatgttcgcccttcgtaaaaccgtttacgggcagtttgacccgattccgttctacgaacacatcactaagctggttgaggctggaaaatacgataaagaaatcctgacaaaatggactccagcggagattgattatctggaatcgaaaatcaatcacgataaagattttgaattttcgtatgctggcgttcagcagttgatcgggaaatatctgttgcaggatcgcacgtccggcgacatctacgaaacaccacagtatgcattcatgctgatcgcgatgtgtctgcatcaggacgaaaaacacgctgataaaatcagtcatgttgttgacttctataacgtgatttcggatcgtaaactgtcattgcctacgcctattatggcgggtgtgcgtactcctacgcgtcagttctccagttgtgttgtaatcgaatcgggtgattctctgggttctctgaacgctgttacgtccgcgatcgtgaagtatatctctcaacgtgcgggtattggtgtcaacgccggacacattcgcgctatgggttctaaaatccgtggtggtgaagcagtacatacaggcgttatcccgttctggaaacacattcagacggcggttaaatcctgttcccagggtggtgttcgtggtggtgctgcaaccctgtattatccgatctggcatcttgaagttgaaaacctgctggttctgaaaaataaccgtggcgttgaagaaaaccgtattcgtcacctggattatggcgtacagcttaacgatttgatgtataagcgcttaatcaataacgattacatcactctgttcagccctgacgttgcgaacgatcgcctgtatgacgcgttctatcaagcggatcagactgagtttgaagaactgtataccagtctggaaaaagacccaacggtacgcaagaaacgcatcaaagcggtagatctgttccagttgcttgttcaggaacgcgcacagaccggacgcaactacattttcaacagtcatcacgtaaaccagcagggtagtttctctgttcctgttcgtatgtcgaacctgtgctgtgaaatcgcgatcccaacttcaccactggatgacgatgataaactggctggcgaaattggactgtgtacgcttatggcgatcgttctcgataatgccgatataagcgaattcccagcccttacacgcatcgcagtacgcgcactggataacttgcttgattaccagaactaccctgttgcagcggctctgaaagctaaacagcgtcgttctctgggtgttggtatcaccaactatgcatcctggctggcaagcaactattgcgactactccgaagcatatgccggaaacgttcatgagttgatggaagcgtttcaatttaacctgctggttgcctctatggaactcgcacaggaacgcggtgcatgtggactgttccacgaaacgaaatatgcacaagggctgttgcctattgactggtactgcaaaaacgttgatgaactggcatcacctgtgtataactgcgattgggaatggttacgcggtgaaatcaaaaaacatggcttgcgtaactcaacgctttctgctttaatgccttgtgaaagtagctcgcaggtaagtaactcaaccaacgggattgaacctccgcgcggccctgtgagtgtgaaatcttcgaaagaaggttcattcaatcaggtagtaccaaaccaaaataatcagattgacttctatgattatctctggacaatggcaaaacgtggaaacaaaggttatctgtcgcacgtagcggttatgcagaagtttgttgatcaggctatctctgcaaacaccaactatgatccggctaacttcccagatggtaaagtgaaatctgaaatcatccttgaagatctgctgtatgcaaactatttcggcatcaaaacgctgtactaccacaacacccgcgacggtgcaggtgaggaagaagcggaagattgcgaaggttgcaaaatttgattcaatgccccttcgggggctttttataaggtaaatccatgttaactgtaatgaacacaaacccagatcacaaacacttagaacagcctatgttctttggtgaggatacgggcgtagcacgatacgaagaacagaaacaccgtgtattcgaaaccctgactgaaaaacaactgtcattcttctggcgaccggaagaagtggatctgtctatcgaccgtatgcagtacgcgaaaatgccggaacacgaaaaaatcattttcgattcgaacctgcaatatcaaaccctgctggataccattcaggggcgcggcccgaacctggcgttcctccctatcgcttccgatgtctcaatggaaacgtggatcgaaacatgggcgttcagtgaaacaatccatagccgcagttatacgcacattcagcgcaacctacacatcgacccgtcgaaagagttcgataaaattctgcgcaacgaagcgatcatgaaacgttcggcttccatgacaaaatactacgatgatctgatcgcagaatgtcacgaactgaaaaacattgtgctcaaaatcgaaatgttaacgtcccacggatatccagacgaatcgatcgcagagtacgagaagaaacgcaaagagcaaatgcgtaaatgcaaaatcgctctgtatctgtgtatgcacgctgtcaacgctctggaagcgatccgcttctatgtgtcgtttaccttcacgttcaactttgccgaacaaggcaagatggaaggtaacgcaaagatcatgcgtctgattgcccgtgatgaagcacttcatcagaaaggcactcaaagcaagatccgactctggcagatgggtaaagatgacccagaaatggcggaaatcgcttaccagtacgaagaggaagcgacaaagattttcctggaagtatatgaacaggaaaaagaatgggctgaacaccttttctctatcggtgatgtagacggcgtatccctgaaaagtacgatcgcctatatcgaacacctgacagatcagcgtatgcgcgcggttggcttgcagtctccatttaaaccaacgccgaacccgtatccgtggatgaacaaatggttgaagtctgacaacgtacaggtagccccacaggaagtagaagtgagttcttacctggttggcaacctcaacaccgagatcagcgacgaagcctatgcaaaatggcgacaaaaatacgcgtaaggacataacatgattgatgcgattcccgtttatacgggagtccatcacaatctatacgcatacctggcgggttgtgttgattgtgatggatggattagtgaaaaaggaaagaatggttatctggttgggcttacacagcatattcaactatgggatgatatggttagcattcaatctgatttgattaacgatggtgttgatgcaaaattatatgaaagaaccagtagaacaggattaggtaatacgttgatgtgcaacctaattattcaaaaatcatcggatctcttgattctgttaccgagaatcattccataccttcgatttaaaaagcaaaaagcagttgacgcatattttaatttgtgtaaacattcagatcttaatgcaagttcatccgataatgatatgaaaggaagtaaacgaaagtattggaagccggaagaaatatccgaactaattcgtttacattcggagggttacaacaacccagcgatagggattaaaatgaatcgttctaccgattcaataagtcataagttgcatcggttgggtatcatgagaaacgaatgatggaatcgaaagtttatagaatgtctcttgacaaatgcggtcgaatagaccgcagttttatcaagtgtggtgagttaagaaattgcgtttactgtattgaaatcgacggcgtgatcgtgtatgttggtaaagcaaaagacatgtggaagcgattagatacgtacaggaattcaaaatactggagggaagcaaaccccagcaacattttgaaaaccgcacgtctggaaatggcaatcaaaaaacgtaagcgtgtgaatctcattgtgacaacacacgacgaaaacacatatcataattttgaaataaacatgatccgaaaaattaatcctgaatggaataaacagcactatgacaaagctaaccaaaaaccagaaaacactcttcaaccaattaatgaagttgtgtaacgaaaccgaatgcttttactttattgaccaaaaaaccgtaatgcaaacccacgttcgcattttcaactatcgtatggcaagttacagcgattggttgaaacctggtgcgctggaatgtcgcggcattatgtttgcaatggatggggaaacccccgtaaaactcgccagtcgccctatggagaagtttttcaactatgccgaggtaaaggcatgggaagcgctgaaagcctctcctgtgacgattggtgaaaccgtagtggatgtgatgattaaggaagatggttccctgatctccaccttctgtgattccggctatctgggcgttaagtctaaagcatccgttcaatctgaacaggctatggacgctatgagcgtgatccagactaaccgcgcattgttcgaccgcctgaccgaactggttaacgatggtttcaccgtcaacatggaatacgtcgcaccgacaaaccgtattgtaattggctatcaggaaccagcagtggtgatcctgaacatccgtaataacgacacgggcgaatatgttgattatcaggatatcttcgcagatggtgtattacgtccgttcctggttgagcgcgagaaaatcgaaatcaccgatctggatgcattcattaccgaagcctacacgaaagaaggtttcgagggttacgtaatcaaaactgataaaggttttgtgaaagcgaaaaccaactggtatgtaaaccttcaccgcacgaaggatagcatcaacaataacaaagatctgttcttaaatattgttgaaaataccgtcgatgacctgaaacaaatgttcctcgatgatatgtacgcactcaagaaaattgacgcattcgaaacgttattccttgatagtctcaatcgtctgactgcaaaagcattccaggcaatcgaagacacgaaaggaaaatcacgcaaagactacgcgatcgccctgagcgctgacttaacccctgacggtcgtatcatcttcgggcctatgatgcgttatttcgatgataccgataagcaaaagctggttgataacatcgttgcattaatggcgaagaactacgaacagtttataccggaagaatataaatgacaaagtgctttggcgctggaagcacaacgttagaagaagagaaagcagggatcgattccctgcttctttacgttgacgttttcccagaaaccggaaaaattttttggaataacaatgcagcaaaacagaatcagggaaaagaagctggttctattatgagcaaatcaaaaccttacgtgagaattcggcacggcgatagaaaatatttaagacatcgcataattttctattactgtaatggttatctgcctttgcttattgatcataagcatgggttggaagctggggatggtatagaaaatctacaggaatcagatccgcttcataatatgctgaaaagaaaagctaaatcaacacctaaaacggttaaatccaaaggtgttgattacagggcttcgcgtggaaaatatcgagcacagataaagatagacgggaagcaaaaacacatcggttactatgataccgaggaacaagcatcaatagcttacgaggaagcgttatatgaatatcaaaaacgtattgggtacgtttaatataagttcgtggatatggcctgtaatagttgctggttcgttagcagggcttttgtacatgacaatcacgctgaaaagtgaaaacgatcaattggctaaagatatcaaagagttacaggctgatatcaaaaaagtcaaagagacaaacaacaccaatacggtgatctatgtcgaacagaaagcgaaggatcagcagttggtcaaggatgccggacgtaaagatctgctgttcaagaaaccaggactgatcgaaatcaagatcaacaagtccttcgaagagtatatggcggagtacgacaaatgaaaattgcaacgttagcccttgttctgggcgttctgttggtcgggtgtgctgagaagcccccagaaaagattttgcctacgctccccgctaaggtgaatccggtgaatgtgaaatggaaagtggttgcagaagtccgagagattgacggtaaaaaataccttgtcatgccttatgacggaaacccatacgttgccctttcatatcccgattcgttaatcttccgtagctggatgaatgacgttaagcgtcagaaagaccagacagataacattctgtgtaccgtgggataccctgagaaatgcaagtcaaaataatcaagtcatttttccgtgacataaccgaaggaaaggtttatgatgcgaagaaggacaaagaaggtctctggatcgaaaatgactggaaccgtgatatgtggctcaatctaacgaatgagcataacaaagaactgattgaatatgagattgtgaaatgaatctgtttattactgtaggcgtaccaggtagcgggaaaactacatgggcgaaagaaaaagcgcgtcaactggggaacactctgactgtttcccgtgacgatatccgcaaaaccctttattgtgctggcggtgatctcactggctatcgcttcaccgaagagaaagaactgtttgtttgccgtgtgcaagaagatacagttcgtaatgccctggcgagtgggaagaacgttatcgttcacaatacccatttacaccaaaaagatcatgatgtgtggcgagagatcgcgaaagagttcaatgctgatttccatatcgaatggattgatgccgatatcgtagaactcctgaaacgcaaccataaacgcggtgtgaatgctctacctgtttcccgtgtctgggcgatgttcgaacagtaccgtaaactccgtggctgggttccggctatgagctatgcagatccgagcaaaccgaaatgcgttatcttcgacgttgacgggacattaaccaaagttggacaacgtagcccgtatgacttcacgaaggttatcaacgatccgcctaaccctcctgttcaagaactgttcaggatgtataaggccgctggttatgcctgtgttgttgtgtctgggcgtgagggtactgcacagtgcgcacatgataccgctgcaagcctgatcggatacgatgttgacctgagcgatggtatctacatgcgcgaagaaggtgatcatcgtcacgatattcacgtaaaagagcaaatacttgttgaaaagattctcgataagtattatcctgttcttgcagtggacgacagggatacaccagtcgggatgtggcgaatgaacggtatcccatgtttccaggttgattacggcgacttctaaaaaacagttgacagtgagtgcgggtgtgataagatacccgcacaaacaaaggagaatattatggttattcgtgaaaatgaaaatgtgatggttgaactgggtgatcgtgttaaagttgagaatcctgttgaacttcaactgaaactcaaccagttaggccagcgcattgctgataaaattcctgctggttatacagtgaagattgtccgcgatggtcagttctccttccttctgggtattttgagtcaacgtaacatcgttgaacagcagttcgggattcagtggaatccggtaactaaattcgtaacatgggcgggggtattatgagcgacaaaatcagaaagattcatcaggcatggttatgtactgaaccaacgatgcttcgttatggttgtgtgtttgggttggttgataatgatcctcaacaggacattgcaacaagtccggttgttgaatatgcgattccgtcgaacaaatcgtttgttgaagtagtgacacgttcaggtactacgtatcacatcgttaaccctgataacgatttcatcaaagacattctgaaatatatggatgaccgatgaaactacttcacatgatccgtgctattcaacacagccaggcttctcgatgcatatcgacccgtgttggtgcggttatagtaatgaacgggcgtgtggtttcgcagggttcgaataatacggttgattctgattgccgttgtgctgatcataacgagcatatgctgaatgacgaaggtaaactgaaagcggttcaccgtcctgagcattcagcatggtcaaacgataatgagatccacgctgaaatgaaagcgttgctaagtgcgcatactaatggtattatgcttaacaacgcagagttgtacacaaccgcttcgccgtgtccaaactgcgcaaaacatatcgaatggtatgcggcaataggcgctatcaaagcggtgtattacctcgataaatacgatcgtggtaatgatgaatggatttcacgcttacagaaatatggctgtatcgtggaacaaattaaacgggaagagttagaacctcatgttaacttttccagattagtgtttaacaacaatgagtaaagaaatgtctgaactgaaagtaaaagcatccggcgaatatgtgatcatcgaagctactgcgcgtccgcagggttccgaaatcaaatctgaatctggcatcgtggttggtgtacgccagcacggggaacaacctttctatggtaaagttgtttctgtaggcgcagatgttccagaagaagtggcagaacgtatcctgggtaaatatatcccgctgccaagcgctcacatggcgaatgttcctgaccctgatctggttgcgggttacatttccgaaaaagaagcaaaagagaaggaaacgaaatacgtttccgcacattacaaagcaatccaggcaatctacgagatctaaaaatggctaaatcaattcaagcaattatcgctgatactgtcagcaagtccaaaaaactgttcgacaaaggcgaaattctggaagcccccgcgcgtattgacgtaatggcagcaatgatcattgacgcgcatcagggtaaactgaaatcccgtgccgatgaagtcatggcgtacatcgtccagttcgaagacgtatgtaaatacgcgaaagatgttgacccgctggttcgcgaaatttatcgcaagcagttctaaaaattccggccctttagctcaataggttagagcgagcgactcataatcgcgtggttactggttcgagtccagtaggggccaccaaatacgcaggtatagttcaattggtagaatatctggcttccatccagaatgttgagggttcgagtccctttacctgctccaattcgggtgcgtagcgcaatgccgttaaatggttcggaatatgcaacctttctcacggagaaggctctgttggtatccggtaataggttccccggaatgcggggtgaagtaaagaaacttccagcccacaaatttaaaagagaaaaaatatgaaaggtctccaaaagctgtttgagttaaccccaaaaattcgcgaaatcgtcgctgcatcaactgaaaaagaaatcaacggtaaattgatgaaactgtttaccgaagaaatcactgatttcgataaagaatatcgtaaagcgttcgatgcgtattctgttgatggtttctttgcatcaccgcaggtgaatagcaaacatgaatatcatcgacgattctttgactggtcgatcgtcaatatcgttcgtcgaactgatatcgaacctacgaaccatcagttgatctctatggattcttctgtgttctttatccagtatcttattactggtggatttaaagcagaaggtattccgttctgcaacgaagctctggaagaagaattcgcagaagcgtataagtatatcaaagcagttcgttaatcaacaggctatcttcggatagccttttttctggagaagcacatgcgctttttaaaatacgcaagctggtttgtactggttccccttgatattctttctggtgttctggctattctgctggctccttttgtggttccgttctacagtgaagaaaccggacacttacctaaagggttccgttggatggaaacattcgataacccgatcgatggtgatggtggacatatccggcgttgggctaacatccggtatcacttaggcgatctgggtgtgtatgcgcaacgtgtaggctggttgtggcgtaacaaggcgtacaacttcgcttatcacgtcttagggcgtgaagcacaatcagacttcgcctggaagggcaacccgaaaacagaaggtggttccgatccttcgcgtcacggttatctgttgatgtggaatgattcggcatgggggctttatgtcttcaagccgtggcttaaagtcggaaaggttcagttctgcttacgcgtgtattgcgggtggaaactgaaacaggaagtaactgaccctaacgggctggatcgtgcaatgctggcgttccatatcaacccgttacgttattatgtcgtagaaaggtaatacaatgaaagcatatcagattttagaaggtttacacactggtacaatctacctggaagaaggtaatgatgttcgtgtgttggtatccaaaaccctcgaaatggattcagtgatcggtaaagctcgcgttgctccattcgcaaaacgtgaagtcgatattgaatttcaacccactgttaaagtggaaggtggacaacacttaaacgtaaacgtgttgcgccgcgaaactctggaagatgctgtgaagcatccagaaaaatacccgcagttaacgatccgtgtgtccggctatgcagtgcgtttcaattcactgactcctgaacaacagcgcgacgttatcgcccgaacctttacagagagtctataatggcgattgaagacgtacagggctataagccccattcgaaagaaaagatcgacaaagtaaaccgcatcaaggccgcagaagttgccctgggcgaaatcttcaaagaactggatgaagagtattcaagtgattacgcggtatcagataccaattcattcactacagaagaactcgatgcgatgcttgaacgtatccatcaaatccaaaaggcgaaagaccgactgaaagaagcctctatgtgggcgtgtcgtgcggtgttccagcccgaagaaaagtattaaaaatcaagccgttgccgaaaggtagcggcttttttgtttttatgcaaaataatgcttgcgctgaatcgtgagtgtggtaaagtacacacatcgaaacgaaactgaggatgacattatgaaaacttacaacatgaaagaactggtttgcttcaacactcgtcgtgaagcccgtgcgtatgttctggctgctggtaagaatacctctgctgtaatcgacctgggtactgataaagctgttggcgcacgttgggctgctgttgtggttatcgctgctcctgtgactcctgttaaaactctggttctgggtgcgcgtaaagccgaaactctgaaaaccagcacttgcggggcgggtggtgttcataatgttacggtcattcgaaaaagatcttttaatcgagtcggtgtatgaaggtatacggggaaaacagaaagaacaatctccgaagagattgatgtaatcaatgaatttctatgtagaccatacgttaagagagttattatgaatattggtagtggtgattcatacccatcatgcgcattgagcaacttcgccccgcatccgtttacgtttgacggggtagaatgtgcatcaatggagggctttttacaaagtctgaaattcagcaatccagatatgcaagcgcatgtgtgtacgctggttggtaaagccgccaagttcaaaggcaagaaaaagaaatggtatcgcgatcagaccctatactggaagggtatgccgattcaccgtgaatcagaagcgtatcaaatcctgattgaaaacgcgtacaatgctcttttcctgaatgacgggttccgccgtgcgctggctgcaaccggaaaaagtaccttgactcattcaatgggaaagaataagatgaatgaaactgtgctcactgaacgtgagtttgtccgaaatttaacccgattgagagatctgttatgataggttataaagattatgatgaaagagtagaatgcgcgttcctgttcaaaggcgcgattaacccgttggcattactccacgcacagggtgctttgagttctaccctgattattggtgttatctacaaagcgggtgtgtattacgttaccatcggcgcgaacaacattaacgtgatcaacagctacgttgaaaaatgtaagctgaaagatattgtgttcgataaagtcgaaatggatgttcctggcttcgacgctgtttatatgtacaagggttgatgatgggttacgtggtttatttcgattgttcggatcttgatccgttcgttctgcaacaagcaaagaaatatcatcaagatatcactggtatcagtgtcacgaacgatgatatgctgtgtatcgaatttgattattatcgtacatttgagcgtgacaaattccttgcggatattgaagcgtttaagagtacccttttctttgatcgttatgaggttaaatcttgaaaccagttattcttaccgacattgacgggatcgccgtaaaatggcaaagcggcctcccgttctttttgtcaaaacacaacatgccgaccgatatcgcgctggatatggttacggatgaaaagttccgtgatatgaccgaaatctttgggtgtgatcaccaactggctaaaatcctcatggaagaatacaataacagttcgtttattcgctatctaagcgcgtatgacgatgcgttgattgtgatcaaccgtctgaaagtcaaatatgatttcgtggctgtcacggcgctgggaaccactcctacggcaagccttaaccgtattgcaaacctgaacacgctgttcccttctgcattcaaagaagtgatggttgtcgggcatggtgaaaccaaagtacaccgctacctggaagcgaaagccaaatatggcaatcgtctggtttgcttcgttgatgatcttgcggtaaacttaaacgaatgtcataacgtcatcagtcagttgccgttattccatatgttgcgtggtgaacgtgaaaccccgtggtcgcctcaccagtcagttaaatcatggtttgaaatcgaagagaaattaaatgatcttacagattctaaatgaactcgcttcgactctgaaaatctcagagaaggaagcgatcctgaaacgtaatgcaggtaatgatctgctgaaagagattttccgcattacgtacacgaaacagattatgtttcacattaagaagtttccgcaggtggacggtaagccaggcacaaccccgctatcgaatgctatcgcggatttgatgtctgatttggcaacgcgaaaatatacgggcaacgcagcccgtgatcgtctgctggatatcgtatcatcggtgaacgagaatgatcgcgaagtgcttcgccgtatcattaaccgcgatctggaatgtggtgctggtacaacgttaccgaaccgcgtatggaagaaactcattccagaacagcctcaatgcctcgctacgccgtttagtgagaaagccttaaaacgtattcgcttccctgcttactcgcagcttaaagccgatggtgcgcgttgtatgtccgatctgttagagaatcagatccgcaaagcaacccgcgcgggaaatgagtatgaaggtttggtgaatctggacaaggatctgaaaaagattcgtgaatatctgggttatgatgttgtacttgatggagaactgatttatgtccctgctgaaaaaactgctgtcgttccttcaaacagcgttccatttagtcttgctgggtttatgggcgatgacgacgattctgtttctgaccttgtggcagatgttaggcgggaagctaccgagaacgagacacaagcggaagcgaaacgcgaagagggcaacgggattgtaaacaaatccctgaaaggtactatcagcgacgaagaacagcgcaatatcgtttatgttgtctgggatatcgtaccgtatgaagtatactatggcgatgctccgagtgttcaaccatattgcgatcgtttctctatcctggaaggtgcgctggctggctctggtgtaacatcggttaagttgatcccttctatcctggtgcagaactacgcggaagcgaaaaaggattacaacaattaccgcaatgacggtaaagagggttcaatcctgaaaaacgttgatttcaaatggaaggattcacgcgttgcggatcaggtgaagttgaagaacaaaaccccgattgaactgcgaatcatcgacgtgtacgaacacaccaaagaagctcataaggtcggagggttcgtggttgaggacttatcaggagaagccagaacaaacacaggttccggtctgactgatacggactaccgatacgatgaagacggtattaaccgcgtgtacatcccgttagaagaacgtggtgaactggatcgcgaatacatcatggcgaacaaagatgactatatcggcgctatcgtcgaaatggaagttgacggactccagaagtctaaaacgcgtaagaagggcgaacctgagttcagtttcttcttgccaatcatcaagaagatccgacgcgataagaccgaaccggatgatattcacgttatcttcgctgatctgttttaaatagcactttttgctaaaaagccccttgcatgagtaaggggcttttgttatattacaaacatcgaaacgaaacagacaaaaggaacatcccatgcaaatcactaaagaactcgaaggcaaagtaatcgttctggtaaatgaagaccgtttggcacaactgggtaacggtggtgaaaaactgccagcagacgcactcgaaagcctttctaaaatgcgcgtgatgcgtgttactgacggttgggttacttgtctgcctctgaacgacgaagacaaagccgtatacgatgcacaagcggattcatgggatatcgaagtacctctggtaaacatcgaagttgaagagtgctacgaaatcgaaaaataatgcttgcttactgggtaatgtagtggtacattacccatatcgaaacgaaaggagaaacatcatgaaaattatgcacactgcaaatcaacttcaaaacggcaactacgctatccacgatgctatcggtgcgctggttggggtttatcttcatggtatcaaactccttgaagtaagtgggaataccttttatggtgttgaaaacatcgaagcagcgatggaaattatcggtgacctgaaatgagtaagaaactcgaaatattcgaaactatcagcgaagaccctaatcatcgctggtgctgtgcgaaaactggttttgatgctgcatggggtgatactccagaacaggcgcgtaaaaactgggaacaccaacaattgttttttgcctgtcgggttcctaccaattatgaggggagtcaattgttagcatgaaaaataaagaatatgacccaatagaagttaaagagcggttatcggtagcaagaagattccttgaatctatcgaccctgataaacttggaaaatgccctgatacgatttgccttaattgtgggcgatccgtaatggttggaaagtgctgtgataatcagaatatcgttatcatggacaggaaagaagtttcaccggaagtgtgggatcggattcaagagatcatcaaaaacccacctgaaccgacgaaacgtttacgcgaacttatgagcaggaaaccacgttatgaaaaatgaaccaagtaaaactatccgcctgatccgttgggaagggcaagaaatccgttatgaagacgacgaccgcgaattcgtccatgaaatgcttgcgcataatctgggattcaaaaacgccgcactggtgatgatgcaacaaaccagcgatgaagacacctggcaatgcgtcattctcgatctggacaaaaacaaggaatacaccgaagatgaactgtttgcgctcacagagaacgctacagcgcgtcagaagtgcttcatgatcgatatgcctcgcgagaactacgagaatatcaagaaagcccgtaaacagaacaagaacaacgtgttcgacctgttcatgggctatcatgaagaaactacggcctaagcctcacttgttttgctggtgtcgttagtagccgctgccacctgtacacattccaatgtttgcaggtggaaatcttttgatacgtcgcggacacattcaacgatcagatacttccctgaatattcatcccctaacacctcaatcaatgcccccactttaacatccattcgaccctgattgatatcaaaccgaatacgtttttcatagctggataacgtctgacacttcacagcctggaacggttgaccctgtttgtctgggttctggaagttgttctcatataccgcgtttctgttcatggtgatccatgcgttttcaatatcggtactcgcaaggatatcactatacagttttttatccgtcatcgagaaactaaagaaacttgcatcccctaacagggtagtgttatccttatgggtaatgtattcacctttcgtgaataccaaagcgtcacctaaaaacgggttacttacgttgaacttgtaagcctttaacggggtttgtgcgaggatctccgtattgcttttcataaagataccggaaccatcttcccacagataacagaagtcagacgaatctacgctctgcccgttgtcacggatgtaatcaaacacggtttcatacgtcccgctcaggcaagccggaggaatacgcacgtttgatgcgtcgatatgcggcgtgatcaacttcatatcgttatacagtgccgtcatgcactctgtaatcgtctgtacggcgttgttactgaacgaacgggaaaacttacgacgaaacaccgtatgcaccggagaaaggtttaggcgcagtatagagcggttcatatcatcggtttcgacgtttgaatacagaacaccgtagtaatgctgttctaacgtttcgttatactggaaggatacctgaataatcggtttttctgtcaactgatagattaactggttatcatagatctgcatcaatgtttcagaagtaccgttaatgatggttttctcactcattgagacaagggcaggtaacaattcaagatagacgttatcagcgaacttttcatatgttggatataatttaaccgacacgacgcggtttataactttactggacattagacatcctccctttatattctatttactaaatagtaaatatcgggatacttgaggcgatcatgaaagagaagaaaaacacacttgataaatttatggttacgcgtttaaacatcaagaacagcaaaaataaagtagtcacgttgcctactggtgaacaggttacgatcccccgtctgggctatcgtcatttcacccagattaaagcaatgaaagacccaatgcagttgcttgagtatatcatcaaagagattcaaccgcgcgaattaaccgcagcagaaaccgaattccttttgattcacctgcattatcacaatgacgataaagcaatggcgatactgaaagagatcggtattaatctggatgatatgaaaatcagcgaagctaagtatgaacatacttttgataaccttcgattggtcttcaataaaccgaccctaatgctggatgatctggcattactgcttaaagaagcgtatgacaacgggaagccgatcgaactgacggacgaaaaccgtattcaattaattaactgcctgtatcgttatgaatatgacgatgtaaaacgtggcgtactccaggaagtctatattgtgcatgaggggaaaaccattaaagggcttaacatcatcggtgaatgataatggctagcaatccatattttaacgaagaacaacgtcgccggatgcagaatccaccaaaaccacaggcgcaaccgactgttcgtaagatccaggcaacgttagataaagattcgatgcgcgagttaaaggatatcaatgataatacccttgaaaccgcgctgaatacactggacatcaaagacagtgtgaaatcctttgaggatcgtttcaaagagaaattcgctggcttccaggaacaatacgaacaggatcagcaaccacttgctgaacagttgcccgattttgttgggccagcgcgtccaccatcattaacagacaacagcacaaccagtgttgataactccgtcagtgtatcgaaccagcataacccatttgcgaaaatcgaaacatacaccggaacgattgcagaagcaatcaccaagtttatcgaactcgctgaaaagaaaccagcccccgcgccggaacctgaaccagtaccggaagaggaaccggaggtcgatcgggacaagaagaagatccgcgataaggataaagacgagaagaaattcagcaagaaagtattgtctttgctgggtgcaatcaaggataatacatccggtcttctggctcgctttatcggttattctctcgaagcgctggcgaagtttgcaaaatggactctgattatcggtagtatcgtatttgcgatcgacgtactgagtaaggttgttcagaagtggttccaggatattcttgcagagggtgaagcctcgaaagatttgtttggttcatacttcgggaatatcaaaacccttgctgagaaaatcaacgaaggtctgcaaaacttcgatatgagtaatttgggcgaatcgctgaaaaacttgttccttgaaccgtttaaggttctgggcgataccatcaaaaccgcaatcacggaaggtatcggtaatctgatttacgctctgggtgaatataccggatctgaaacgattaccaacgccggacgcggaatgaaagtatcagcactgcgcgacaaacaaaaatacggtcttgaaattgatcccgatgatctgattctgctgaaacaacaggagatccaggatcagaatgataaagtggttgaggcacgttctaaggttgtcgaacaggttaaggctacccagggcgcattctcatatagtttcggacaacaaacagacgcacagaaagcattgtctaagcaattggaacagatgcgcgatcgtgtggctatcgaagaaaagatcaccgaagagaagaagaaagaactgaaagcattgcaggaaaaccccgcactgttaaaagctgaggttgataaagagaataccgctaaccgtaagcgcgtggacgaaaccaaacagatcgaagcagcacaaaaggctgagaagccgaaagcggaaaatgatttcgatcgtggtgatcagattcttgataaagaaaatatcaccaacgaagacaagaaagcaatggagaaaattcttgaatcactcgaagagaaaaacaactccaagaaacttgacgaagacgatagcgaacgattccgctcaatgcttgaccagtggcagaacaagatcgccgcagtaccggaaagcagtgcaagtattgacaagcaaccggaacctgtgaaatcacctgttcagcctacaacgcctaacagcgttcaggtcaacaacaaaacagtaaacaacacggttcagcattcagtacaacgaactgaccgtaaaccattgattgcattagcttaaaggaaatttaaatgaaaattacagtattgcaagacactgtacaatcatttgctgaaatcaaaaatgctggcatcccctctgggggtgctgcaacaactaaaaacgcgttgactcaaccgatcgtaacagcggaatttccttcccaacgtgcagcaggtattgataacgcttataatgcatcaagcctgtataataacggcttgctgttcacagcatatgatttcacgggtggacttgcaccaggcagtaaagacaactaccgctcattacgtcaggcagcacagaacgcgcaacagatccttagtgctaacactgggaacgttcgatacaaacaggttttgaatacccgtactatgggtacacttaaccccatttgtcaaatacttttaccgcgaagcctgaacgataacgaagtgaactcacaccgttatcaggatgcaaccgatagtattgttgctaaaggtttatcccgtgcggtatcaaacgttatctggggcgctgtagaatccgtttctggtggtattctggcagaccgtagggaagcaatcgacatcggtactaaagcagcgtttcaaggctctgataagcgcacaaagatgtattacaatacattcgttatcgaaagccgttatgacctgctggaactgattaaaatctattacctgttcacggtgctgggttatggtactacttcgggcggtactccagcagaattagccggactggttaagcaagcgtataattccagcgcttcgaaggttgcaaacgtttttgcaccatcaacaaaccagacgacagcaagcgatttcaacggcagtatcggggatcagattgttgacttcgtatcgaacgttgaagttattaaatcgcctcctgtgtggtttattcgtgacttccagacaggcgacagtttgcggttccctcattccacgttcgggccagcaggtattaccagcgttcgtttcgggcgtacaatggacaacattgtaaatacgttgagagaatcaccgaacaccccgatcgcagttgaaatcgaaattcagtttatggaactgatcgatatgcgtcaggattcgatttttgatacgcagtattaagggggaacaatgttctatagcgtagatgaatttttgtcaggaatggcaaatagagactttcagcgaagcaacttgtttagtgttgtattcgcaaccagtccagcatcacgcattctcgacagcacgatcgggagtatccgcgatactttaatagatggtactatgagttccattaacgcgaataacccgaacgagttcatgaacgctattacagggggcgtaagcaagctattcagctatacggttgataaagctattatgtccctgaacaaaacaggtttcagtaaaatcatgggggcgttaagccctcgtttaattacttccctgtttggtgatagtgtttacggacagatgctaacagaattccgtgacaaaatgatgtataatatggggttgagcatcgttggtgttcagttgcctggtaaaacactgggttatgaatacgtgtataatggcggtgtaccccagatccgattcacccgaccggagaatggtgaattatcgctaacgttccgtgtggattcagaagcgcgtaacctgaaagtattcaacgaatggttatcagctattcgtgatgatgtctcaggccagttcgcattcattgatgaagtatcaagcgcgatccaggtaaacttacacaatcgcgatggtgtcccgcacagcacgtatgtattccagaagtgtttgcctgttaaagtcagcaacccagaactgagttatgaaagcaataacgaaatctggacattcactgttgactttgcttataaaacaggctggcttgttgaagcagataaagaaggttgggacggattcaaacaatcacttatcgaaggtgcagcaattgccgttcgtggtgtggttacaggacaataaggggcgaaagccccttttgaggttaaaatgattgatataatccgcgtaaaactccctggtggagtgaagcgattccctatgtttaccgtgcgcgatcagttgagtttcttactcacaagcgcggacatggaagggaagacgctcacagaacagcaagaaatgctggatgaaattttagatattctgtatccgggttattcccgcaccgaacaggaaaacattttcactaaggtgtattgcgtatcgttcggtaagaacgcaatcaagatccgaatcaaaggaagcaacggacaatcagaagcattcatgcatgtaactgattacgttttgcaaaatgaatatgcccttgatgattcgcttactctgggattcaaattcccgaaacatcgtaacaacagtgaacaattattccttgaatgtatccagtatgtcaagcaggacggcgaaagatacgaatggaatgcattagacgaggacacaaagaacgcgatcctggatctggtgtctattgaagatatggaaaatatcgttaaactgttacgcaagtcctgtcatgttaccgtgcgtgatattgagttcagcgacttattgacactgtacaaaatcctgttcaacaaatcagaactgaatgagttcttcaaaaccaactatttgttaaataagaataccgtacagattgaacctataatgaatggaagcccgatggaacgttcaatttacgttgcattactggcggaagacttgaaacgaaaagagaatgcaaatgcgtaaacatacaccccgacatatcccaaaatataatgtgacttatcgcccgttaaccattggcgatcttgatgacacggataacttcattattgaaggtgatgtgttcaagcatcagcgcgattatgtttacattatggctctgttcgacagtatcaacaaagagactgtagatctccaaatcaaatgccctgaatgcggggaactgattaagtttgtgctcaatcgtcatcatatcatggtggatgaatacgaagaaaagctgtacggcaatgagatcaagatttcagtcgaaccacaccgcaccggaaaggaagagttacccgaactgattaagtttgtagtcatcgacggtgaacaaatcttatgggatgactgtaaagagtcagagaaagaagccgttctggatagtatcgactatccggtctttaaatcaataaatagcgctctggataagccagcaatcgttgcaaacattccggtaaggtgttcgtgtggctacgagcatatcgttgcactgagaggcttagaggcgtttctaaaggtggttggataaaatgggtgttaaccttcgcttactgtacagcgatatcgatcccaacttaacaaaagactggaacaatgacgtaaccgcctcgaaaggggcggcagcggtaaagaatagtctgatcggtatcgtaacaacacaaaaaggcacacggcctttcgatagcaactttggttgtgagatcggggaacagattttcgagaacatgaacccgctaacagcggaagcagtaaggacttcgattgtctccgcgatccgcgcatacgaaccccgtgtttacaatctggatgttgaagtgattccgcagtatgacgaaaacgcaatcaccgtgacgatttactacagcatcattgatgaaccggaagaagtagaaagaatcaaactccagctatcatcctcataacaaaaagccccgaaaggggcttttcttattccatcacgatccagcccattagctgttgatatcgcaattcgaacggggtgatgaaagagcggttattgataaccttcgtcccgttataggacttaatcacttcctcaccacgaagcacatattcgtatacttcgtccatagtgtcgtaacgcacttcttcgacttcgaagcagaagttggaatattcaatcattccgatcttgttcgcgtaacggcgttcgatgcagccctgtttttcaatctgagtgatcgcagtatcaatgaactgcgcaagtgcttgcatgaaattaccacattcgacttcacgacccccgcttgagatagccaggtaaacgcggctcaatccatcattgccgatgtaaccgatacagtcaccgccaatatagacagaccagactttacccatcggccccatacccatacgattctcactacgagaaacacctttcagtaacagtgccatgataccgccgcgaacgtaattcattttcatgataagccccttattttttcaggttgattaaccaagatggttgggtttctaaactaaccgctttccaagcatatgcaacactataaccggaatacgtctgacatacaacagcattttcatttaaatatttcactttgtgatctgcctcttgttcatccagggcagcacacacgatattcttttcatacactccgccgtttggctggataatggtttcttcaatcagataaacgctgttcatgctaattccttctcgattgcttcgatgatgtggagaacgtaaccgttcagttcttttgctttatcagcggcttcaaccataccgtaacgaggaacttctaaaacgttcgcaccttcgagcaggttgctttcgatgtctacgattacgtagctctcaccgattactgcgccttttctccagtcttttacgaacttcaccattttagctttcatgttctcgttccttttggctgttccgtttcgatatgtgtaatataacaaagccctcacgcgaacgcaagggctttttgagttaatgcataaaagatttgacgtacttcacgatttcttcacgacacatatcgaccggagtatcctctgcaatagcagcatgacagaagatttcaccatccagccagaacgatagcatgtactgaatatcccgaccttcgttttctttctggtgtttcttgatgcgatcaaatgcatcatccatgctttcggtagctgtaagcatttcagattcacccgctacagcagccatttccccagcttcatcactgaattcgctttccagttcttcccagtatactatcgttatcatggattaccccaaacagattttacatttacagagaggacattccgcctctttaacgcgcaagcgctttgttgctgttcgcttcgctgtgttgtgatcatacacatgcaaacagcggtaacagatcaccaatcgtttagccgtcataaccaccaccgcaacgaacatcaccttcaatgaacagttcgcggttatctctcaggagattgtatttcttttcgagttccggcccgaatgcgtccgcgtcgtcataccagtcatagttataacttccggtttcatcgtcgtattccggttcgtcgccgcgctcattgaagtgaacgattttaacatcatccagattcagttctttcagcttgtcccaaatgcgggttatttcgacgctattacatccgaacgcttccagtgtgattgtaccgtcatcgtgtatttgaggcgaaccccagcgaggacgagtatcatcaaacatatccatcagagattcaacgtttgactcaccgtaaatctttgcaacttcctgttctttaccagggcggacaagtccgatcccgataatgaaactactgcttgagctattgctcacgaacccagaacgaatcttcatcgtcttgcctcatatttcgcgttctccgcgattttctcatgatacaggttgtatgacaacaccagcgggatacaagctactataagcccgatgaccgccagttgatattcgcgtttatcgaacgccataaatgcgatcgtggctcccagaataaacacacctaatgcaatgatgaagaataatgtcattttggcagggtatccatttcacgagattttgctttcaggatgtcaatcacagtagtcatcgcctgttctacatcaccatcatagtgaatcaggaatgttttgtgaagtcccatgatcagacgattgatgatataagccatttctgacggtaacagtttaccattctgtcgattgtacttctcaaacaagcggtagagttctgcgctattgcctggcttctcgatgctaaaattatgcatcccggacagaataccatccagatacagaacagttttgttatcactgcgcaggtgtccgccaaccttgtagtagttgctgaatacatacggcttttcgcggatatcttcgatatcgaaatcaccatgatcttcgatgttgccaacatgggcgaagaaatgatgatcttccagttcgagaaggattgcaccctttttgtaagggaatccgactaaatcaatctgccagccattttcaccgacaaatacatcatcaacaaccacgaaatccggcagcataggcgcgtatgcgtggttcttttcgttgttttcacgataggcttgtggttcggacaggtacaggatatcgccttttacaacttcaccccagaatacgttacgtgacatattattttcctcaatatgccccctttcgggggcggtcattgttagattttgacttctttttcttccaggacgatttcacattcgaatgatgtggtttcccagactttccagaaatcggatggaatattatcttctttcggaagaatatcttttgcagcgatagaaactttggtttcttcgaagtccagatccgcgaaccatgcatgggctactacaacaccgtacattacgcgacttaaacgggcattcagtttacggacttcctgaatcgttgcctttgtctgcttatcaagatactcgactacctgatctttgtcaagcgcatccagttcagatttcacctgatcgtaagcccacaggataatcaggtcgccgttgttcagtttcttcttaccttcttcacgcttcgcgacggtagccgctacagcaggaagggaggaaacacccttgattttcacgttcagttctttcgacatgtaaacatcagtcgattctgtgcgctcaaccttcggagagaacccgtaatcacgaataccctgttcagacagccattcacccgcagcctcaccaaagcgctgtttcagcccttctgcgttgcgcagtccgatcgcgttgtcacggaagaacttcataaccttctgacggcctttcaggatttccagacgcacgttatcagtcacgaactctttaccgcttaacccgcgagtcatgccacggttaaccagaggcagagaggtaaagtctaccagaaccgacatacgatcatcaccgattttttccagcggcttgatagtcaggccagaagcacgaaggtttttcagtgtcggaatatcggtttccagcggcagaactttaacgttcacgataccatctttaacgatggtgaagttacgcacctgcttagtttcgactttttccggcagaccgaattctttctgtttgctttctgggatagtcacatacccttccagatccgtgttgatggaaatgttcggacgggaactgttacccaccagatgtttaaccgatactttggttgtggtttgggtaaatttcggtgtccagacttcatgcgctaccatttgcgccgccagtgctttacgttcttctggggttgcagcgtttgcgatctgttcggtcagttgatccagtgtatcatcttctttctgtacagtctgacggcctgtgcggttatacgcccagtgctcagaagacaggtcgatcactgtgtcagtttgtgccagcagttcgagcgcatcaaccagagtgaacgcgttttcgtctggaaccatgttgtaatcaataccatcaacgaaacgctgtgatggatctacaacagcctgtgcaatcaggtctttcgcgttggagtagtcctgtttggtaaagcagttgtcatacgctttgatcagacggacatcacccagcttttgaagcactttccatgccagatcagggttcattgtgtgcagtgcatgataaagcacgacatacagaacttgctgttcgctggcgatgttcggatcgaatccgtcaacatcattaatcgcgttttcacccagcgcccagatgtttttgatgtgttctggaaccagcacaacaccgtttgcagcgttcaggacatacacgcgcccttcgtccaggtagatcgcatgggtagcatcagcaactttgacttcgatacgcgcggaagtctgcgcggtgatgatttcgttaaatgctggttcgtatgcgtcgaaaccttcaacgaatttgtgcaatgcgttggttgcttctgccattttttccagcagaggacggtttacataataaccgtattccaggaacgcgatactgttgaaagtcagtggcagaaccgcacacgctttcagaatatcatcggtacgccagcagttatcataaccgtctgtcaggaagatcaggctgttcaggttgccgttttcagattgcagatcggtagcgatttccgcagccagattcaacggctcaacaaagccagtacaacccgtaggtttcaggtaacggtcgatagccgcgcagatgttagacaggtcagagacattgctaaccttctcaccacggaacaccgtgccgtaatcgcctttgctggagaagtacaggatcgaaacggtgtcatcctgtttaaccagactcgccaggtttgctttcaggtgtttacggatcttaggcagttcgttgtacattgaaccggatacgtcacacacgaaaacgtggtttgtcggggttggcttcgatacagcgtttttgaattcgatatttgtgattgacatttaaattttctcgtatttgaatttttctaaaatttcgttaactttattgcttactgcttcgactgtacgatcacacccgaacttacgcgccaggagttcaacgtattcatccatcgtagtgagtttggattctgcaacgtcaaacgcaagcgcatacattaccggattccatacccgaacgatttggagagtatactcgttcagttcaaatcgttcaagatattttcgcaaagaaaatacatcaaacggtgcggggcgatcctggctaaaggggatcgactcccctaatgcatagcgaggcataacaacacaaacttctgttttcagtttattatccatcagtgatgactctttgatgtgtgttcaaggttacggaagatgtttccatgttccagttgagttccgatcgggccgcattcatcggagtacgtgaattcatagataaacacgccgtcctgattgccgaacttcgtgttgtactcttcatacaaccacattttgatcagagcgtctttctcttctgtgtccagatcgtaccagtctcgcccgtcatacgcaagcgcaatttgaggatttgaacggtaacggttttccgcgctttcttcggtttcccagtcatagcgcttatcgtcgtagaacgattcaaagctattacccagatgaccgcctaagtcacgatgaacgtgattgaccacttcttccgctgtcaacggcggatcgtagtaaccacaatcagggacgcaatcacccatcatttcgcgcaggttgtcgatatcagtcggatctttcgggaaccggacgatgaaactacttgatgaactgttgctcacaaaaccagaacggattttcattttacatcctcaaattgtaagttttctttggttgcgttcgcaatggctttttcgttgttcagtgttactatgcgcagacgttcgccagtaaagccgtcgcattcagtgatactcacccagtcaaaagatttagccatttcaatcgcacgttccagcgatacggtagaaccgaccaaatcactaaatgtatagtaatcttcgcttaaactttcaacagtataaattttcatgatactttaccctttgtttcggatttcaggacgatgttactgtaaggatcttttgctaccagttcccacaggtcgccaggatgttccccgctacggtagacggatgaacggatgatttcgttaaacttgctcagggcttcgtctatgtcgtcatacccgcatttgagaggcttacggttgcaacgaatgaagaacatttcgttggtattctccccgcgttcggcgtttttaaccttcataccgcctccattttaccaatgacttcttcgtatgtcacagggttaggttcatagccgttagcgcctattgtatcgcctactctgtttcctactaaagaagcaaccgcaactttcttgccgtctttccacgcagtgaaatgcagattatccgcaacatacgggaaggtttcgtgattgttcaccgcgtcgatgcagtccataacggtatcagacgcgcagatcagattaccaggttcataatcaaccaaacattcaacagtgtaaatcataataatttcctcacgaaaaagcccctttcggggcttgattaatcagtgtccgaacacaccacgaatagactctgcgaacgcgtacagttcagggtttttcgctttcactgtttcgatttgttccaggatgtaatctggtttgtatttcgcaccgaaccagcagtaagagaaagaacgatcccacatgaacacgttgtagtattcaccgttacgcacttcaaccatcacgtaacctggattagaacccagcgggtaatctttcagtagattgaatttcgcaccagcgccagtacatccgttaaacaggtcattaaaagtcatggtatgttccttttcagtttcgtttcgttaaagctaagataccactatcaactactggatgcaaacacttttttgaagaattttgtttccggtctttctttgtacggacgcattaccaaatctttaccgtccagcacggttggcttaccttcgagttcgatcaggatgaagtttcctttatgatacttcaatacgccctggctggcagaccattcatcattatcccagtggttgtaatgccattcaacaacggtatcgatcgggatttctggttgatttctcataatactttcctaatttgtttcgctatggcttcaatcacgggtattgaaactgaatttcccgcttgacgatatgcctgttttttactatccggtatgataaatgaatctgggaacccttgcaaacgaaaacactcacggggagtaagtcttctggggttctttccttcctgcaacaccagacattgaacgccgtccttgtaatactgctgggtgatagtcccagtgtgcgtagaatcgcttgtgacggcctgataaccgaaacccttaccgtttgccttatttcgttccttacgctctctaaagcccttccatgcgttatctgacagggtgaacgaatcatcagcatcttcgaggatgtcgcctactcgcgtaggggtgcgcgggggaaccggaaacgaaaagaatacgtcatccagaaagcagacaataaacacgcgttcgcgtctttgaggtagtccgaaatcctttgtgttcaggcgttgatagaatacgttgtatccttcggcctccagaagcccgtaaatcgttttaaacgtcttccccttgtcatgggttagcagttcaggtacgttctcaaagaacagcacacggggctttttagcgcgtataatgcggaggatttcaaagaacactgtaccgcgcacatcttcgaatcccagtttcaatccggctttactgaacgcctgacacgggaaccccgccagcaggatatcatgatccggtacttcgttttcatcaatctggaacagatcaccttgtaggttatcattgccccagttttcgatatatgtttgctgtgcgaacttgtcgatttcagacgttataaggcattcgacaccgccgaatgccttatcaaatcctaatcgaaccccgcccacacccgcgcagaggtcaattattttcatacgtcaaaatcaatctcgtcaattttgtatgagttttcgtcaatgtccgcccagagggttacattaacatgtttgctatcttcgtacaactgacgaccatcaattccgcccgtgtaattgctttcggtacgttcagtaacttccaggcggaggctatcgcgcatgatctgaacaacagcctgttccagtgtaaccgcgtctgggtttttggtatcgcccagtacaacatctttaacgttcaaaataatatcagtcattagtgccactccgttttaataccatgtcggtatgcgtcaatccccagcggggtaatcagcaaccatgctttcgaattatcgtgatagcccgttacccttcgagcgtaacctttttgaatcagggcatcacgccctgatttgctgggtacgtcatcgaaatctaagtctagcaccttagttgcatatccgtaaagtttatacagaacatcaatttcagcgccggacaatttaggatacatcatttgtaataccccacaacatgatcgcggtatacgcgttcgatgaaatcgttccagaattcgcggtcaacttctttcggatatgttgaaatcgctgcaagccgttcgacttcgcccatgacttcttccagcttttcctgtacggttgcgaacggtacgccgccagctttaaccagtttcaggaatgcgctatcaggcagaggataaacgatatcaccatctttgtaaatctggatcaactgcataccaccgcgcaacgcgtgacttaaagccttccagtcgatgccgttgttggcttctgcttgtcgtgcgcgttctccgtattcatcccagagtttgtacactgacttacgcatttcatcggctttgatcgtgaactggaatttacgccccagcacttcatagaagtcctgacaaccagatttcattgtcgtgtcggtaacgaatcggcagaactcgtttgtagggaaacgattcttgatgtcagacactttcacttcacgcgtatagcgtttcatatctggtgtgaattcctgaataccaccgatcgtttcggtttctttcagtacatcgacaacttcgcgcagtgcagccaggcgagaacctttcacaccatattttgcggcttgcttgcgaacataaccgaacaggccagttagttcagtggtgtaaaaacgccagcggttagcgcggatatactgccagatttcagagttagcgatcagcttgtcatccgaagcgtgaagcatatcgagcgctacggtatcaccatcacacgcaaggctgataaacttagtcagactatacaactgacgatcaacgtcgtctacggtgtttttagagcttttatcgcccgtgctggtgtcgatagtctttggggctttccccaggagaatatcgcgcgggtgcgggagaaagatccctttatagtctttatcgcttgtcggtgtgttcagtccatacaggtgagaaccaaacacggtttccattacagttttcaaaatttaacccccagggtttttgcgataccgcgcagttcagcggtagtgatttcaggaacaacaacagcgtgagaaccgaactcttttcggatcttttcactcagttcagcacgatactggatttctttgtatactgcttcgctgcgatacatataaaatccgccccagcccccactaccagaagtcaatccagtcttacgatcgactttctcgatgttccagcttttcaaatcagcgtctttatcagtggatgcatacagatattgacgcgcaacctttagaacgtgaaattcgcgagggtttgctgttttacgggtattgtataacctttcgccaggatcgtaaagggtatcacccactttcacatcagttaaatctttcggattcatttcattttccaacgttttgacttttcacagtagaacaccggaagacgggccagaactggcttcactacgtcttcccctgtgttcgtgttatgaaccacttcgattgtaagggattgcccttcggacggccttacaatgtccagttccaagatctcacgattaccctttgtattgatttccgctacgtagtaatcgtgtccattgatgtttacgacatcacccataataacgctaattgtttgaatcatgagtatgcaaacttaattttaacattcagggaatccagcaggattgaatcacgcccatcaatgacggttaatcccttgtatttgctatcgtcttcgctcttacgggagtatacgcgacaaaccagagaaccatcctgtgctatgtattcaacatggtattcacggcgttctgacgtaaacacatcaccaacaacaaccggacgatcgacattctggcgtttagtcccttcgtaggacagtttgccgttgccgtctacggcgcattcaatgcccttatgtgtgacgctcgcaacagtaacaggctctacagttccaccgatcagcattgccggatctttggttcccagtttcatcaccagtgtttgacggatattatttgacatcggttctgtaacaaacacataaaccatatcgtttttatcacgcgcaacagattgcaaagtgaaattcttcgtacctacagaaccagtatgattgattcctacacgattaccgggttccagcgacatacgacattttacatcagagataccgctaagggttgctactttcatgatttaattccttcaaagtcttcattagatttccaatacacgttgaagttacggcaatcgtggtcggaagtcaacgtatatttttcttttgttttctcgtcggtgatcaccatcgtttcattctcgatcgagtccacaccatagacgaatactttatcaccgcgtttattcaggaacgcttcacctgtttcaaccaactgccagcagttgacgggtaaaccacccgcacagatcggacggtttacgaggcagtaaggacgtttaatcatttaaattcttccattgcataggaagtaagatctttgaaataccttgcggtgttgccttctgggttgtttgtaatctccatcaggataacagcaccatcaactcctgctttcttagccatgaatgaaatggcttcggtagcaataatcgttgctttcataacatcagctttagaaacgttgatcgtattcatttttcttccttttcattattcatgcggtatgtgtatataatacaaaagccctcacgcgaacgcaagggcttttttaatcttttatcagagtcccgtgaaagctacaacgatttgatagtggtcatcgaagaattccccttgtcgttgtacgacctcatgtaagggcatccagaacgcctctaacgcatcgtcagaaccgcccataatgcggggcagacttccatcattgttaggctctaacttgatgtactgcgccacagtcggttttgagaagtgtacggaacgcttcggatgatcgaacagcatcgaattacggattgaaccacggataaccttttcaggaaccttgatccgtacctcttcgagcagttcgcggatcgcacaatccaggaacgtttcatttgcgtttttgtgtccgccgggaagggctaacgcgtctttacctggggcgaacttacgacgaattaccagcaggtgattgttgcacacaaccacactatcacccgtgcaacagtttagcgcgtcggggtatgggtagtttttgaatttctccaattcgctttcccatttctcgtattcgtagaataaacgccagaacgtgtcttccatcatccatttgtcgatataatcaacggttgcttgaggaacaaagcgcaacagtttcttatcccacccgtttttatggttaaagataatcggacgcagatcggttgctgatagatccttgccgttaatctggacaggtggaactggtacgtgtgtccatccgaacgctttaagccagtatgaacctgcatctttttcgtaaccgtagatagcgattttgtcgcctttggtttccctgatagcagtacgaacagaggttttccatttctcttcgttgtaaagataatctggaatgtgctcaaactgaacacgaacaacatcttcgatcgggaagttagcgtttaaccatgagaagatcatggtttgacgctcacgcgccgtcagcgggtttaaaacgttagggtaagcatatgctgaacccagaaggatgtaaacgatctttgcttctccgagtgctttacgcaccattgctgcatgaccattatggaagggttggaatctgccaattacgacagctttatcaaattgtttcataacgtgctccacgtttaaaggttaatcataaaacagacgcaatcaccaatacaccaagaaaaccgccaataaagccgaagaatagcgaaatgaagatagtaaggatgatctgttttatgttcattatagtattctcgttttaggagtcaagcccccaagagcgggggctttaaaaccttatttacgagaatcgaaaatcactttaccagcgtaatcagaacccatgacagtttgaggtacaccgccctgatatttgtccgcgatggtctgctgaacatcaagttctttccagcggatcatttctggggtgattgtgcgttgcagaatggcgttcgcttcggcttctttcttagccgcatacagacgggcatcagcatcacgctcgttagcctgtgcagcattgctacgggcttctttgtcggcaattgcctgaacaactgcctgttgagcgatttgctctttacgtgccagttctgctttttctgcgttcacctgttcttcacgaattttcgtgttttcaacctgcttcttgatcgcttccggcaggtcgatatcctgcaagaatacctgtttcacggtgtaaccgtaaggacgggcatactcttcaacttcctgctggatcgcgatctgtagctggctttgaacttctgcattatacagatcctgtgctttcggtacagatttaccgaactcacggacagttgacagaagtttttcagtcacatatttatccagcgcctgatcctgactacccgcattgatacggttgatcggggctttgctaccatcgaactgtaacatcacggtcatatccacagtggatttgaatttatcctgggacggaacctgcaatttgtcaaacttcattgcgatgtctttggtgttgaacacctcgaaatcagccagtggatttaccaggtggaaaccaggcagaacaggcttcggtgaaactttacccatgaaggtttgagtttttaccgtaccatcctgaacgatagtgtacgagttcggaaccagccacagagcggcgattacgcccagagcgatcagtgtggttttcttcgggttgtttacgatagtgtttaagttcatcattatttccattgggtttatgtttcaattcgatagttattctatcatcactttttcgcttgtcaaactctttttaagaaagttttgtcagcttgtaaatcgtttgatagcacaagcctttgatctcgtccaggacgttcttcaatgaactatctactgaatcatagatttcgttggcttcatcggctattttacggagatacgcgaccgtgtcaagcacattttctgtttttaatacgggtttgtatcgaccagtaatgcctatatggatttcggtgaatttatcaaccaaatcctgcatatcttcgtaaaacccttcaaatgctttatgctgtgaatatgaaccagtcgcaaaatgtgcgctgtgcatataggttacagacattaagcaagtgccaataaaggcatcaattttactcgcggtatcgcgttctgttacttcgttaaacgtctgcatcttcatcccttatgaacgatgaatagcggcgaattcacttgcaacccgtagccctaaacgtttacattcgggttcggatttacattgcttctgctgccattttcgttccatgtaattatagaatagttcgctggtatttacgctgggagggatggtgtcaagatatacctgtagcgccgcgttgatgtagtaatcgaactctttggcgactacggatctatcatcagcatgtgatgacggagacaagattaacaaaccaaacatcagcgctttagatatgcgtttaatgttcataagcaattctctacgtgcttacggatcaacaatagatccgttcctgtatatatttatagcaaaaaaggggcgaatcgccccttatgtaaaattagtctaaaaatacatcaagttatctcataccagcataagctacgctcaaaagcgcggatcttatttgcgttctcgatattttcatcccatccaattacgccagctttcatccggcgtaattcctgacgcattttagcgcgtactttcgaatcaatctttttcacagcgattgaaagcatcgcggagatatcacgatgagctttgttaccgtcgcgattcaggtttttatcgaaccggatatatgcgcaacctgatttgtgtttccagttggttgtataccaacgtaaaccatcaggactttccccgtgctgtgcataatactctgaaaatgcttttgtctcttcgatctgttcgatggaggacttatcacggactggaacatatttcttacggtaagtacggctcatagtgttctcctttgtttgtctgaatacaccttaacagttcagaccaacattatcaagaagtttttcgtgataatgtttgcgacagagcgaaacgtatttgtcttcggctccgatctcaacctgcgccccttcggttacgaagttgccttgtgcgtcgatacgtgcaaccgtagttgctttgcgtccacagtgacacattccgcgcagttctcggatctcgtctgcccaggccagcaaccagtaagaaccctcgaacagattcaactggaaatcagtacgcagaccgtaagccattacagggatttcgagttcatcaacaacgcgacacagatcgaaaacgtttttcttcgaaaggaattgcgcctcgtcaacgaagatgcaagcaattttattccggcgctgaatgtcccagaacagatccatatcaggcgcaatcaattcacacttttcgttcagcccgatacgcgaactcactgtgtttgatgtgcgggtgtcgattgctggcttatagattacaacacgcataccgcgttctttgtaattgtgcgcgtccgtcaatagtcgcgcactctttccagcgttcatggatgcatagtgataatacagtttagccattgacacgctccacaaacttaatatgattctggaatttaccctcaccttcatggtttttgcatgttttgtttgaacagtatatccaccaatcccactcgtcgtaagggggtttgtcaatgttcatgacgcaaatcaaagggaaatgacaatcccgacaacgaactttttctataatgtgtgcgttagccaattgtaaaccacccgttacccatgagttttttgttacgtcgcgcaagatgctctttgatttccggcatctggatagcaatatcatactcttctttcgtcatggtatgatttgcacaacccatacacccgcacacctgcgcgttacaccaacggagtgttccgtatgtcgcaatcaccttcattgctttagctttgattttgtcagtcatgattataaccgcccatttcgctatcttgtgctttatggatatcaagataccacatgttgattttgcttttcagttcgcccatttctttatccagtccttcatcaacaagacaaagaatgtcaaccaccgttttacgctgtgtgatgttgattttgttcgctttcatggactgcgccagcgcttcacaggttttcaccagtgcggcgcgttgtcctttgattgcggcgatccgtttgttcgctttcttgatcgcccgacctgctttgataggatcaatcatgataaatccgccttacgtggatcaaccgatggatcgaagtgaacgacgatgatcgggtaatctcccgtacactcgtcaataatggcgctaatacgcagccaatcacccccagcaagccccgcaccgataagaggggtaatgataggcaatttctcaggaaacgccctggcgcgttctactgcgctcacaaagcatgaccggattgcatcataatccacttgtgggccagtaccccagaatttaaactgagtgtatgcattgaagacaatctgaccttcttccgtcatgtagatggagttagtgcctaacttccgctgatcgcctttcatagtcagtgcatcaattttgaacgcaccagggattttgtgcttcacttctttagcaatacccgcgcccatgttgcaataacagttacacccatgaatcaagtgtacttttcgtttcaggaacaactctacagcgttccctttgatttctttaataatcattttcatcacctgtatagtggcggtaagccagcacagccagccccgcgatcacaaccacaacacacattaagatataacctgtgttcatttaaattcatcgtcccatctttgccacgcttccaactcgtcatcatatacagggaacgagctttcgtttggctttttaacgtaataccagataatgattgcagcagcaatcacacacccataaaagatcactaatcccaacatcagtataatcctataccagcgttatattcttcaaccaggtaagtacggagtttttcacaacgttcattatttggcgctttggtgcagaggttcatcatcggttcagactgcaaaaactcacgctgtttaaccagcttctgacgcttgaagaggtgcgcattttcttcgccccatacataagccgcgtccagttgttcagcgattacctgttcacataccgcaacgtctttaatgtcgcgatggttgcagagttcagccagtcgaacatcagcatgagcaaagccagcaaacagagtgagtaacagcgcaagttttttcatcgttttaccttagtatgaatcgttttcgataggggtataataatgggtttcgcagacatacgcaagcactgatcgcaaactatcgctttcaaattctggattttgattgagtttcagactccaacccgtgaagcacatccagcgttcttctgcaacgtcaaaggctaaccaatacgtgttgaactgtgaacatgtatgttcgaagatatcgaatagtagtttaccgccgatcggtttcacatatggtttcacgcgttgaagcgatttcaggactgtttcgaggttactgcgatcctcattcatcgcgatacggagaatatgctgattggtttcttggttatatccatcaatccccagacccatatcctggaagaacttagtcgcatcatggaaaatctctcgtccgctgttcggggaattgatgtagaactcaatgcgttgttttggagtcatcgcgcggacacgggaagcggttttgtgatcgatctcgtctttgacctcctgacgggctttcagcaacccgttcagcttttcctgatagggttttacaatcgctcggatttcgtcgatacgttcatcaataattgctaactgctgttccggtgtcagtttagtttccatgttaagcccctacgcgcacaaagcgatcttcaattgcatcattaacacattcgtaaatgctaacgtcattcgggacgtgcttacgaatacccactttcacgatatccatgatctctttgttgctaccccacacgttcaggttgaagtaaacgccaccgctatgaattgtgttgttgccaacatcaagatacgtatcttgactttcgcagataaacagtttgcgtttttcttctccatatgcgaagtagatactgaacgattccatacgatgacgatcgaccgtgatggtttccactttaacctttggatctttgttcagttcatctaacacaccctgaatgatgtgcagcatgttcggcttgatgatagtagggtgactggtaataactcgatgtgatgtgctcataatttaatcctcaatagttggtacacacataataaaaaagcccctgcgaaattgcaagggctttttatcagataatgcgtttttcttctaacagcttcgcggtatggttaaccatgcgagcgtaatcacgggcttctttctttgaatacttgaatcccgcgttgtaactcgccagcgcctttttcaagtcgcctttgtggtaatcaagccagtattccagttcgtgaagtgcatacttggaaccaccccgaagggtttcgagcttattgattactacgcgtttggaatatgatttatccattcgtgcggacgcgctacgggctgttacttgaaaacaaccataagcatgatgattctttttgcctttccctacgttctcacatgcgcgagactcgatccaggcaatagccgctaaatgatatcccaaacgtttcgatgtttccgattcaactggctttgcagttttgcgatcgtactcatttccgatcctgaaagcgtactccaaaacctttttctgctttggtgtaatatcatccaattccttaacatagctgggggcattggctggcgctttcttcattactgttgcttgttgtagcggtaaagttgacttcacagcggggagtgtttggataaactctcctaacggatcagtcgccgcgttgccagaaaaagagcataagaaaatgctggcagcaaagataattttcttcattgtaatacctatttgtaacaagagagggctatgataccctcgtcttattatttatgcaacgattttacgctgttttgcttcggtcagttttttctcgatgaattcagcaatgttatagtttgaaatcgaaacgttcggatcgtacagttctacgatttcatcaaacgatacctgaaccacatgtttaaagtgaacactccagccagtcgtaaagatttcgctgttgtcgaacccgcaatcagggctgaacatggcgcggtatttgtatccgctgtaatctttcaaacgattcgggctgtgtgcgtcactggtgatcaggaatttcccctggtgagtctcaaccacgaagaaataacccagacgttctttgttgtccagcatcgtttcgaacttgcggttgttatcttcacggtcaacgcgagtttggatcttcttccagacctgttcatattcaggccaatcatgctcgacaacaaccccttttatgggttctttgccttgctctttacgatagcgatcaattttattcactaccgcagagagaagcagtttgtcgctatcacttaacgccgcatcaatatctgcatatttaagcactgcataacgttcttcgcgtttcatactactacatccttatcacagactggacaccggatcacacgatacacatcacgaccgccagtgtaatcagtagataccttttctttgacatcctgcgcagtgtatgacagaacagcaccacaacgacaggtagtttgttttggggtaatgcttacaacttgaaccataataacctcacaagaatagtttcacttcgctaccgcatttcgggcagacgatatgttttttcacgatgtaatcagcagcacggaagaaaccgttgtagaacacttcgtttttcttctgtacatcagacagttcatactctaacccacttttgcagttagtgcaaacggtaattagctttggactaacaataacgctgatcatgtatacctcacgaaaaaggggccgaagcccccttgattaaaagttctcttcgacgaatgcagccagtcgcccacgatatacggtatccaggatcacatgacttgaatgaccgtactctttaagtttttcaaccgcatacacaaagccgttgttaacagcagtgtttcgcgggttgtcaatctgtttaatattcccgcatagtatcagaagggtgttctcaccgcaacgggaaatgatggatttgatttcgtgattgctcaagttttgacattcatcaacaatcagaaccgaacctttacccggatcaggatgcccgattgagcgcccacggaagtaatacaggctagggaactggacaacgtttttctccagcagcccttctacatatttgtcaacttccggttgatccttaaacagaatgttcaggctcgtaatacatggttctacagcaggacgcagtttttcgcccagagtaccaggtaagaacccgatttcgcccgacagaggactatccgatttaacatacatcaggtttgcaaagtgtccggcgttaaccaggtgcattgcaccagcaacagccagcattgttttacctgaaccagcagcgcccatgatggtcaccacatcggtatttttatccataattgcatcaatgaatgacgcttgcagtgcatcgcgaggctgaattgttttcatcagcttacgcttcatcgcggattcgtgtttgattggtaagagttcaagctgatactctccagcagccactacacgccctacaagttcaccatccgatagaatgtattggttcgggtaataatcgccgtcaggaagcgaggaatagcttatttgggctacttcgccaacatatcctaacacctcgacatcatcccagaatccagggatatcgacataaccagaatacaacacatcgctatctttcagcgagtcatcgcccgtgtattgttcaacaggacatcccttagacatcgcgatcaacagcatgttaatatcgcgggtgatcagggttgcgttttcctgcatacaggttgcaatgattcgcgcatcttgtttatcaagcgggaactcttctgaaccgatataatcaacgatgcggagtttcacgctttccggcagtgctgggttcgtcaggttcaacgaaacccctgtttgggtaattgcttcgtacttctgccccaggattactttagacaggaggcggatcgccaatcgtgcttcatgagcggttcgctctttgcttttcaggtgatccagttcttccattgtcgcagaggtgataatgatttcagtacccgcctcaacgaatgagaagattgaatatgggttcgagattaaaacgttggtatctagaacatatttcatagaagttttcctgttaattgcggggtacgcggattcgcaccccgcgcactgcaattacatacccaaacggataatatggatatatgggaacgggtgaagatgacttgaacgcatacacaaggtcagcgtttttgccagttcaaaccgttcgtcgatcgtcgtgtcacattcatcgaaaatcaggttgattgcctgatacttgatggtctgaccacgaaagattgtccgcaaatcctgttttttggaaaggaggatcacgttatcatccccgcgatcgataccatttccgattgcttcatccatcgccatttgtttcgtacaagcaacgtagatattcagtgtccctttcgactgcttgatgatatcgaaagccgctttggttttacccgacatccggcccatatccagcgcagtttcgaagatagacacaccgccgcattcttgcccccaacgcccatcaatgattcgcgcaaggtgcaggttacgtgactgctttacagcgtcaacatagaattgtgaaatcatgttgtcgccttatgcaagttcaacgtgtggtgcgtcgataaatttcgtttcaatcggaaggtttggatcgttcttccagttgataccgtaacgcagttttacgccctgttcatcagcggcttgtttcactgcattcaggacaggcaaccacactttcgggttagtctgccagccagcagggagaacgctaggatacagatccacagcatcaccagtgatgtgttttgagttcatggtctgggaaacacccttgcggacgttctcgcgctgttgctctacggtgcgcagaccttcgcgtacaccaaaatcaacaggcgagagttccaaagcacgttttaccaccttaaccagttccggcttcacgccttgcaggttgttcaggcttttctgactaaatttaaacatacatacctctttatgaaaataccctatgggctacacagggtatttacggtttaagaggcgcaacgttttacatgtaaccccaaattgcatcttccgcgcgatcgcgtttccagcgaatcgtcatttccagcgaatcgtcatttcaacactctcctgtttgtcatcaggaggaagtttatcattattgatttgttcaatatatgcttgcgcatctgcttcgctacggaacaacgcatggaaattataatggttgcgcccagttacgttacgatcatccagagagaattgacctttattttcccaatcatcatacacagtgattccgttaacaaacagccccagcccacgatgttcacgcgggaagccagtgatgatatgttttcgacccatctgtgccttttcaccagtgatactgattacttcgtacaggattgcgccaggtttgatatctttcaggacagcacgtttttcaaaagcgttcataatgtattcctcacaattagttttcatatacagattaccacaatctgttttgatgtcaacaaggtctatcgtttttatttgggaaagttaacgtgaaaaggcgatcgtgtaatgcttcgatccgttcatacgcttgtttcaggatcgtcttatcttctgggttcgttgtctcgatgcagatcagttcgtccgagtcgatagcgatcacatcatccatcagtgaagcgaatacgttcacgtcagggtgagtcaattcctttatctccgcttccatcccgtcatgctgggataacagttcgatgatatcgcgctgtaaatctccctggtacgggaatccggtttgaagatggttgataattctttctgctttggtcatatttcacctacaaaaaagcccctttcggggctgggattaaatgtctttgcactggcaaacaccgtatttggtgaaaggcttgtcaccgctcaggtaagaccagatatcgcaagcctgttcagcggtttcgaagattgcagcatcatagaagccgtgttcttcgttaccatctttattgaggaacacaggaagccagctttgcggtttgaagcagtcagtaacaactacccaaccttctttcgctttcattgcttctttgttcgcttcaaccatttccagcatttcgttcagtaagttcattttaatccccttgtttatctgtttcgttgtctacgagagagatattatcacaacggggattagtgtcaacagttattcgaaacgaattgtgctatttttgaaaaacattccagagcacacagatcctttgatctgcttgccgttcacaccagttgcttcgaatccggttgagtatgtgtctttttcagaacatgcaaaccacttgtaacccgtgaactggatgttcgtataaccctgtgcttccaggatacgctgtgcctctttctcgtcagtacagcttgactgcaagaacacaacaacgacaaccatcaaaatacacacaacaattttccacataatttatactcttttaaggttagttttgctggcttcgatccagcttacttggttagatccaatatcacccagacatacagttgtatgactaaatgtgttcggtaaagaaacaccatcaggagataacaacaaatcatgtacacttacgctggttgcatacaaataaccaccggacgtatacagtgtttttatgaaatcatatgaatcgttgggccacttgaaacggtatttctggttccagagttcaacttcatgcacatcatattcatcgaacaggggatcgttgccctttgtcgcttcgtaaagcgcaccgcgccattcaactaaatccgcttcgatatcacttacacaaaactcttcttttgcgctaagtttatcaagcatcatttcaatagtgcggatagccatgcttaattcacgatcgagtttcatacaataccctcttcttcgagcacttcccagatcaggcgatccaggtgcatcaggttccacataacggagtcatacgaacccagcgagcgggagtaaatcactccccatgaacgataagccttttggaatgattcagcactgttttcatcgtgcggcatatcgtcacccgaagcgatcagcagtttcagaaccatcaggctattgagcgcctttggcgtgaattcttgttcgcttaacttcatcgcgtaccgttcgatgatcgcgattgacttcggatctttaatacgcccatctgtacggcgcgttttaaacgcgctcattaattcatcaactacggcggtacacttcatatgcttcatccttttcctgtgcagacatccgattatagcggatctcttcgcgctgttcaacttctctcacggcttcggctttcttctcagcagtgagtatgtgatgaactacagcgtttcggattccccagagatattcaatcatctgcatatcttcaacggtgtgatagcctttcgcatcacattcaaatacaatttcatcgcgttctgccattgccacctgtgcggtagaaggacaaataaccattccagagtatttttcaatcaacgattccagtgtacgcggttttgctggaatgtcaatagataccggaaccattcgcatcgttgaatcattatgggattgataaatcatcagaatgtaatctccgcaaactgcattctacgctcaatcgcatggatagcgttatcgcgctgttctttgttttcatatccagcccaggtaatcggggttgaacagatcaggtgaaaagtgattgctgggtgtctcttcccttcaacaacgattgttgcatcatcttcgatccaggttacgtgatccagattcaccggatagtttcttacggtaacagtttcaccaaccaaaagcgacacgtccagaatatcacgatcgcggacatatgatttaatacgagatacgattaacattatttcaactccactgcatatacatcggtttcaggggctttgtgtacgcgcatatctttaccacataccgcataagccggacagttacgacaaccgttatgatccttgttgccagtcagttctttacggaactgttttgttttcgggtgttcccagatatccttcacaaaatcttcggcttccagaacatccagaccttcttcccagccaccttcaacccagcgttcggtaaacgagcaagggaagaactgaccacgttcgttgatgtaagagctaaacatcgtcgcttcacagtcttcggcgtattgcttgtactgttcgaagttcgggtgtccctccatcgcttcaacgaaagcgggggctgaacagctatcgaatccaaatcctacaccagaatcgaggcaatattcaacaagttttttatattgttcgcgggtaacggtgtcccagttcttaccgcgtcctttttgtttcagtcccaggaacacgatcgcgtttacttgtttcaggcgcggatcattcttcacggcatcaaccacgttaaacgcgtcatcataggttttcgagctaaccatgaagtgaaggttgatttgctgttgtccggcttctgtcaggttcgctactgagtcgaaagcgacatcaaaaccagcgtgtttataaaccgataccgcaacagccccagcaaccgccgctaaacgcgctgcaacgtcttttgatacgtcagcaatggtaaggttcggcacaatgcctttagaacgcgcatacgccatcatatcgaacatatcagggtttgtttgtccctgtgcatcagcaccgagggcgcattgagtaagccagggcattttgtcgatgatttttttgaagttggcaagatccatgttgaacccgttcgggttattggacttgtagcagaacccgcagagtttacccgctggcccgttgcatttggtagtgatctcgatatcgagaatttcggggaatggtgcgtattctggatcgtgggaatatgttgcaccccagcgagcgaattcaccagtatcaacgttgaaattatagttgtagaacttcgagcgagcgaagcgcatattgccgtgttgatagatgaacagggacggcgctttgatgctggtaacgatatcgacagatttcataatataattctcaaaatttaacgtgggattggaagacagcgcgagcaaggctttcattgtcgaacggtatcgactggtgtttctctttgctgtcaatattaacgcgccagaactcactcgaaccgtttttggtggagtaatgcatcagcgttaccgttttattcttttccaggaaagtacgtttgtcaatctctgttttgatttcgtgctgcatcattttacactccgtttcagtttacgttcgtcagccagttcttttttgtacagtttaatgtacttcccgttaaggatgcgaagctgttggaaaactttgttacacaaagcacgttttgctttgtattccggcgtattgcggattgattcgatcgtcatacccatttcgtttttagggtaagcgcttaactccgcgccgatctctctgtaccagttgcttaactgatcacgctgtgctttgtactcttcaaaagttaacattataactgatctccgtaatctttcgctgcatcttcgggggttgcatccagtcggtaaagctcaacggctaacggactgggtttgatttcgcggttcaggatctcactgataccgcgaaggaattcgatataaggacggaatctcatttgatacgtaccgcgttaaaagcctggttgcgcagttcataagcctgttcaagctgttcagtagtgaacagagggctatcggtattagtggtgaaactgcaaatggttttgttgtcggcgttgacttcttcaacaacgatttcataaccccatgccccgctgtactcacatttcacgttccggtacttgatgtaaaccgctgcaatatcttcttttttgtagttccggcttttgtagatgatttccatgatatcctccttcgtttcgatgtgtgtacaataacagatcagggttatggagttttagcaattcgtgctaattacagtagcatttccatttgcaacagaacgctccagggattcggcggtaacagaaccattgaccgatattgcttgaccaccaccagacattcacgccgtcagttttgaattcgatgttcaggtagttactgaaaatatgtttcatgttattccccttatgccattttcttagcgattttccatgcggctttgaacgctggaacatcttcaacatcaacccagaaaccagaaccgaaaccatcgttgtagcaagggcaaccgtcgcagtagttttcccaggtcatcactttaccaccaacagaagcaccagtttccatcgcacgtaatgcatcttcaactttttccagtttttctgcattgtcgtcataaatgatgaagtaccatttgccgttgtattcgttacccagtttgattgcttcgcgaacaagtttcatgatgatttcctttttgtctgtttcgtttcgatgtgtgtaatataacaaaagcccctggcggttgcaaggggctttttaaacaaaaagtgctattttgtttcttcgaggattcgaaggatttcggcgcgggtgatcggatgttttgccagctcacggatcgcgtggtcaacgtgtatcttacacatcaaaaacttctccccgcacttgtcgcatgttgcatacatatcgccatgtatacgcccgatcccatcggttacggaatgatgcatccaggcgtaaggagttccccgcatccatccggtagcaacatgtttacattctcgttttcgtccgaacatattaccacccgttaggattgcggaaatgtgtttgccagtagcgcagttgttcgcggttcatgttttggttatcaatcaccataccctgaatcatctgcaacatcatgcgggtttgattgacatcctccaggctcgctatacgctgttttaaggctttgttttcctcttctaactcaaccatacggttgtatgcgttgacgcgctccagaggcatatcagggcgctctttgaggacacgggcgcgggatacttcgcattcgtgatttgctttccagtgcgcagcttctgattctgctttttgcttgtctcgaagcgcgagtgacagatcgctaaccagatccagaaccgtttgcggatctacggtttccagatattttccgagaccctcttcccagcttttaatctgtgtagggctgtcgccatatggaacaccatatgagaacgcgcgtttatactctttgcccctgaaaccatattcctgatttccctggatgctcatattttcaacgagagtccacttactacccatcatagaagaaatcgaacgggctgatttttcaatttcttcaagtttttcacttgttactttcattttgtactccacaaatcatattgtgcgcgaaggatagcgtaaaggctaccgatattgattgaatcgaccggacactggaacatatcagagcgcatcatattgaactcaatattgttctgttcaacgaagttaccgatcattgatgtccagcccatcaccaggttatatccgtcttcggataacccgtaagccaggttaaccctgatacaacgcttatcagccagttctacgctgatacagttacttgaatgcatggaattgcatggaaatttgttaggaaacttacggaacatctgggtaaggagtttagccgtttcaatgttgatcgcgcgttcctgatccctttgcgcctggttgtcatgacggcgattcagatacttttccatttttgggttgagattcacatgttgcataatatattcctcacaggtttaaagcgttcttttccggttccattacatgaactgcatttcggagatcggtcgctatcatatcgccccgatccgttacatgcaacacatttccgtaatttccagccatacacgaaccgcatgtaataatcggttcgtgcggccttgcgttcgtggaagttcatactttgttgtaaacctgaaccagccacatttcgatgttcggcgcgtaagtaacgtttaccatcggcatagtgcggtatttgtaagcggctttgtacgcatcgagttcagtcggaacacagaaagagaaaccgttgtcataacgttctgcattagaaacttcacaaccaactacagcggcaatgtttttgttcatgttcatgatgttttcctttctctgtttcgtttcgatgtgtgtaatataacaaagcccttgcattgctgcaagggcttttttcactttaatcgaatttttctggcaactgatctacaattacctgagtttgatggatttcttcactcaatttatcgcggtaatgaaccagttcacgggttctggatgctgaatagctaatgattttatcagcggtagcggtgtaaccgtaaccagcacatgcgatttccagttttgcgttatcgccattcggtacgcggatatgagcataggtcagcaagtttttaaccgcttgtaacagttcatgatcttctttaccgatgataaactgatttggttctactgaatcaatgttcagttcttcgtctttgttcattttgcagccttatacatttcaaggacgcggttcatatgctcttgtgattgaggcacacccgcgaagttcagtttgatgaagaattccagacgatcctttttggtgcattcatccagccccagggcaggtaatgaaatgttttcaaaggctcgctgttcgtgtcgtggcatttcgtcccagaacaaacgggaaccgtccggcataggaatcccaatttcaccttcgtagactttgataatcgtcgtcaggcgttgtttaccgtcgatgacttctacccagtgagtttcgttgaactggctatcaaccgcgatcgcgatgataccgcaagggaaaccactgatcagggtagtcagaaacgcatcttgctctttctgcgtccacacataggggcgctgataagatggattcagatccagatctttattcttccaccaatgcagataactcccaaccatgatcgcgtgatcgcgactgcgaaaagttaactgatcgcggatacggttatgaaccggaatatcatctttagacatgattcaccacccaacccaacaaaccagtattgatagccgcaacggtaaggcaaatcacagccaacacccgcgcgttatgaactttagttttcagttctgcgatctcctgatccttttcactttcgaactcgtcgcgggttccatagtaaccaggatcagcagcggttgcgatacgcactttgtctgtttcgaataatgttgattttccatgatccggcccaaccacacccagaataccatcacggtcggtattgacaattccgtgcgttccggctttggcaaacttaccatccttaacggttactacacgatcgccagctttgtaagtcataatatatcactctttcacgttttgttgtaagaactctaacagctttccttcggcctgtaaagcataaagtttattcaactttgcgatgttttcaaagtctgatttttcgctgaacgaccagacaccatcatcggaaaccagcgcacctattgatacgccagtttcaggatcacgcgtcaacgccagccccaggggatgtaggatatctttattgattttccagatcaaccccaattgagataaggtgttgaaatcaacgtgactcattaggcatcgcaccgaatgacagcagccccatacgatgatcgttatctgattcaccagtgctgaattcaaattcttcaccgctgatactgatagcacggaaaccatctttcaggtacggcaacagatacagagggatcagcatcatttttgaatcgtcatcccacttacggaagcccaggtttttcatttcttccagagtcaggtcatttggatcgactggttcgaaatcaggggaagcgtaaaggcgtccaggcagatcgcgaatatttttcacggtgaatgaatcaccccatgactgatacgcgataggttcagcggcgcgggttgcggtagccagaaggatcatttggcagatttggaaagtagttgcttttggtttcatgatgtatatcccacaagtttagtcagtaaattccccatagtcttacgcgcatgatcgcggatctggctatacggaacatatttgaagtcatccatttcagtaatggttcgaccatttttaacgaaggttgaagcacaaacacatttttctgcttcggggtaattattacccacatatacgaataacacaagctcttttttactcgtataatcaatcagacccaggctcaacagttcgtgttgttcaactacaacgcccgtttcctcgaagcattcacggatagcagcattgatcggggattcgcctttttcgatatgcccctttgggatgtcccaatgaggcgtttcggttgcgtggcccattaaaacgctgccgttattcaggaagagaataccagcagaccgttccattactgtgctccgaacttacgatcgtatgctgccagcgctttatctgctgcatcaactgcctgagtgtgtttgttagcggatttctcgctgaacacttcgcggtaaatggcaacccagagggatcggcgggtctgttcgctttcttcattgacgcgagaagccgcaaaagcgttatgttctttgatcagttgtgcgaattcagcatcatgatcaatggtttgttgttgaatagctgtagaagtcataattcacctatttctttcagttcagttttgagtttttcgagggttgattggtactgaatgccgttcacaatgtcgttgcgtcgggcataatacagcgtaccagttttgtttatctctgccaacacttctttatcgagtttatcaggttcattgctaaatgcaatcctgaacatttcttcggcgttcggcgcgaatccgttacagaacgtgataccgagtttcggatcgaagaatatcagggatactttattcactttttccataatgttcttcgtaatcctcgcattctgggagataggtttcgcagaacatacacagcgtgaagaatgtaggctggcgaattccgatattatcgggtaagtacatccagaacgtgttagcaaacacgatgaacgttttcaggttttcaacggttacggtactgataccgtcataaccggattgagtaattgcgcgttccaggggaacagggtattgctcgcagtagttggcgtaatgttcgcttgtcaccagcgcattagccgcttttacgagatcggtaattttcattcaatatatccccaacgaatttttacgttatcttctgacgccggacttgtaggagtcgggtacggatagctttgcgcttcccacagataaacaacagcatgttttgtcaattcttcgataacttcatcgaaagtaccgacactggtttgtaaaggcaacgagaaaggtttatcgttggtttctacttgagcgattggcccatctaccaagataacacgaaccgttgtgtgctcagacatatgagcatagattttgtttttcatgcgggtacatattccactttgacaggttttgcgataaggcgttctttagtgaagccttgcccgttacagatatcacaaacgtaactgatatcttccatctgatcaacccatccagaatccggcaagccagaaggatatgtgttgacacgtttgacttcaaaccctttaccttcgcatttagggcatacgtgcggatacttcgctttcagttctttggagatctgacgcaaagttttctcgccgccgaacacagcacacaattgctgtaaatcagggattcgaagatcggcgggag

SEQ ID NO: 37 - DNA, 178580 bp, Unknown
  source: /note="Description of Unknown: KP2M-M0109 Bacteriophage sequence"
catatcaactgacaggttcattaagacccgaacaattagcggaaacgctatacggaaaccagcaatactactgggttatcctgatgcttaacgataattacgatccgttttacggatggattaccgatcaggaaacggcttatcaatgcgctatccagcgttattcaaaagcaggtggtgaacaggttctttatcatatggatggtaagggcaaccgttattacaatttggttgaagaccctacgaattccggtcattggtatgacaaaggcgataagaacatgcgttatttgcagtaccagggaacattagtccctgtagatatttatgaagatgcggtgcttcaaaatgaagcaaaacgaaccatcaagattattaacccctctgatattcaatcgtttgtaagtgattatatcaaggaaatggaaaaggcaaacctatgaaatacggtggaaataaatactcccctttctttgagggggtggtcgaagaagtcgatgatcctcgtctattggggcgtgttcaggtgcgtgtattcggtgagcatccggcacagaaacaaaaatctgaaactatcggtattccggttgaggaattgccgtggatgatgcctattcaggatattcgcagcgccgctatttctggtgttggtttttccccgactggtatcacgcgcggtagttttgttatcggttactggcgcgataaatggcaccaggacggcgttatactgggaacctttgcgggtgagtaccgagagaaaccggacacccagaaaggcttctgtgacccgtttggtgagtatcctcgttatgtaggtaacgatgtcaacgtactggctcgtggtggcgcagaggggcgcggttcttcgagcgtgattattcgtgatgctaacagttcgttagctgtcaatccagatgatcgcccacttgacgagatcccagaagataaccgtcctgatactggcgggttcactatcgaaaccatgcttaaacaggatgaaggtatccgcacaaaatggtatattgatagtgaaggttatccgactatcgggatcgggcatttgcttatcatggagaaaacccgtgatactgcgaagatcaatgccgcgatcagtaaagcagttggtcgagaagtaaccaatggaacgatcacagcagaagaagtttcaacgctgtttgctcaggatttggcaaaagtccggcaggggatcagcaacacttcaaacgttcgagaagtatacgtgacgttaaaccgtcctcgtcaaatggcaatagaaaacatgtgcttccagatgggtgttggtggtgttgccaaatttactaatgctctggctgctatgaagcgtcaggactggcaaaccgcttacaacgaactgcgaaactcaacatgggctaaccagacaccaggacgttcttcacgcgtatctaaaatcgtgctgacgggcaacctcgaatcatacggtgttcaggttccagatccagaagggcgttcattgagtgctgcatacaatgctgttgtgttggctgcatcaaatccagaagatccttttgttcctggtgatacccgcgtaatgtttgaagaacctaaatcggcatacaacgctgaatatccatacaacatggtattcgaatcccgttctggacacattcaggaattcgacgacaccccaggctttgaacgttacaaccgtgttcacccagcaggatcatacgaagaaattcgtcctgatggaacccgtgtcgttaaaatcgttggtgatgattatcaaatcgtcatgcaaggccgtaaattaaacgtcaagggtaatttgcaggttgttatcgaaggtgatgcgttcatttacaatatgggtaacgttcaacagaccgttgatggtaacgtgaccgagttcgtgcgcggtaacgtgaatcaaaccgttgaaggtgaatatttggggctgattaaaggcaacgcagaattaaccgttgaaaaagatgtaaccgtaaacgtgaatcagaatttaatggctaacgttaaacagaatgcaaccgttgccgtaacagaagatgcaacaattaccgcaaaaaatgctctgattgatattgagcaagatttggatattggcgcacgtaatatcaacatgcgagcatcgaataatactttcattgattccggcgcactgactaagatcactggcggtactgtacaggtaggctaaacatgatcatggattatgaaaccatcattgatgggattatgcaaaactttcagcatccttgcgatgctgagatccccgctggatattacagacgcgttatctggcagggacacacagaaaattaccctgctgttggggtagaatgggcgaccgaaatcatcccgatcggaactcacctgtatacgagttcccctttcgggcagaaaagcgatccgcttccggtggtgaactctccaaacgtaccaacgaatccagacggaaccccaggggtttctactgacattctggttacgaagattggttactatttcgccagtcaagcggatattgatgcctatatcgcatctatcggggctactaagctcgcgggtaatgactggtacggggctgatctgtcaaaagcaaacttgttcaagaaccctggcgaactcgcgatgtacaaggtggaaaactccggtggttacttgctgacttctggtccccgttgcgatcagcgaatccgacaggtatacaatcagactacaggcgcgtttaccagcattgattattactggaatggtaatcgtattgcgtacatgaaacacgacgaatcccccgcgcaccagtgcaaatatacagggatgtcagtaaacacgaacgcagataccagcattcctccggttcctcctgctctcccgtcaacgtatggggcgctaccgagtgaagccagattgttttctgctcgctctggattgggctgtattccggcgaccgtagggttcccgtatacgaatatcagtgatgctatgctgtctgcgtggaacgagactcgtaaaacgttcaagctggcttttgatatgctgacgggtacgattaagaacggtaagggcattgcgacgatgtttgacgggctttcgatcgggatggaagaaatcacagcgggtgctctggcattgtcacagcaagcatggcaaaccgcaatgaaggtattccgacagatcattagctctgcgtttaacatcgtgggcggggcgtgggatttgatcaagaatttcctcccgactgttgcgatcatgggtgttgcgatcaacatttacgatctggtgtttggtgatagttcggttcaatccctgaaagattctttccaggctctgattgattccggcgcacagacgtatgaaagcgtcataaacgcaatatacggggctataggcagttcttacaactacgccgttgaatatgtcaaggctggcgctcgcgaccttgtagacgcttgtagcgcgttatttgactggtgtttgactatgttccaaaacggttgcgttgctttggtagatttgtacgggcgcatgatgcagatctggtcaatgcctccagaaacaccaaacccgctttggtctgcggtgctggctatccgtaacatcatgaaacagattaaacctcttgatgtgattctgggcggtaacttcccagggtttacagcaatggatctgtatcagcaagcacaagcgaaagtgaaagcgttcattgatgcatcctatgcgcagatctccgcactgtatgatcagggacaagaattattcaaaaccctgaaagcacagacacaggaaagggattcgattaaacgtaagttcgatcagtacctaaactggatgtgggaacctgtaaaggaagcaacgactgctgcttatcaggctgcacttgatgccgctaacgctgctgtgaatgcgactaaggccgcatatgagggaatcaaagcacagattgctaatctgcaaaatgggatgaaagacacctacagcatggcaatggctgaactcaagaaactgcctgtaatggctcagattaaccagttcttaggttactgtggggttgcattcgatgacctgttaaaaacgtatgagaacgcgctgacgggcgcacaatcgctatataaaaactttgttgacagttcccgctcgtttaaggacacatgcaaggtgatttataaccagatttgtacgcttgctctaagtaaggtaactcaatacgtaaacaaattattgtcattaatcggactcgcgatcacattcggttcaattagtgtttgcgtccctatggttcaatactaaatacccgataacgaggggtaataatggctactacaaagaaacaaattaatcagatccccgatatctttgtcggggctacttttgacgaaatcaaatctgacttaatcaactggctccgtggtcaggacgaattcaaggattatgatttctccggctcacgcatgaacgtacttgtggatctgttatcatactgtacactgtacattcagcaaatgagtaacaccgcactgttcgaatcgtttattcgtaccgctgcattgcgtagttctgttgtccaacaggctcaggatttgggctatatgccggactcccgcaccgctgcaaatactgcgatcctgatcactgcgaagaacccactgaacccgacatcgatccgtattccgcgcggcacgaaattcatcggtacagtgaaagaaacaaacagtttcccgttcgtcgtatctgatgacgtggtgatcgttcgtgacaaagacaataactatgtttcgatgctgaacatcgtacaggggcgtttagtccgtacagaagtcatctatgatggttctacgattctggttcgagatccgaacatcgaccgtagccaggttcgcgttactgtcaacggtgctcaatgggatgactggacaaacgaaagtatcgtaaacgcaacaggcgcatcaacaattttttacatgcgtgaaactgtggatggacataccgaagtttactttggtgaaggtgaaaccagccaacaggtcgcaggtggtgctctgactgcggattacatcgggggcttgaaacctgcaaacggttcgactattgtaattgaatatatttcaaccaatggcgaagaagccaatggtgcggaaaactttgtttatgtggatacattgacaaatatcagcattacaagtattgttgaaaacccgactgattcagcggactatgtaggcgctgatggtggtggtgaaccggaagatatcgaacgtattcgtgaactcgcgcctattatgcgtgagacacagcgccgttgtgttactgcatcggattatgaatcgttcctgtctcaccgtttcggttctgttattcaggcggttcagtgctttactgataaagaaaaacctggctatgcgttcatcgctgttaaaccgaaatcagggttgcgcttaacctctgttcaaaaagaggacatgcaaaactatctggcgaagtataacctggcgactattacgccgtcgatccttgacccgaactacctgtatattgtacaaagcgttaaagtaacgtatgatatcagtaagttgatcgagtctgaggaatggttgcgtggtcaagtaatcaatgaaattgacagatactacacagataacgttgaaattttcaacaaatctttcagtaaatccaagatgttgacttatgttgataacgcggacgtgtcgatcattggttcttctgcgactattcagctattgcgtgaactggataactattacagcgccccgatgtctggtattcacttcttaaaccaggtgaaatcacgttctgttgtttcgaatgggttcaagtacacaaatgctgctggtgattcgtatgatgtgcgctatgcgtcaacagatatgaacaccacgaccggactcgcgaaaatggttatcgggccattcaaaaacggtgatatcggtatcgcagcctatacagaaaacgattttgataaatatcctggagtaaccgatcgtgataaatattacgaagtcggctatgtggaacattttaatgatttcattagtttcgatcttggtgtcctgaacgttccatccgagcgattcagcgctgcttacatcgaactgactggtacacctctggaagagaacattttcacccgtgatggttctctgattgtatttgaaaacgatctacgtcctcaatatacaacgttgacgatgaatccaatcagtcaataatttacaacccctgtcatttggcaggggttttttgtttgctaaatatgggatataagtaaaacgcaaatttggagaaacatatgattaaagcgccgtcaattaccagtttgcgcgttgataaactggctgctaacttcgtttatttgaagtgggatagcgtcggcatggatttttactatgtcgtggaaatggcagaaactcgcggggtaggtggtgtaactattccagatgaagatttaacctggttccagttgggttatgcttatgtaaacgaatggttttcttccgatgttcagcccaacaatttttacaagttccgcgtcatggttacgcacaagggctttgaaccgtctgactgggtttatacagatgaactctggacgtttacccttaacgcttacgcatattcaaccatgcgtgaatttacgccaagcgatgcattcataaacgagaaattcgcaaaaaataatcagaactacgttaactttaatacagatgtggtaatggcagcgttgatgaaagaagactttgtgttttctccactttacactgacgtatcccagatcagcgataaaattcttacacaagaaaactatcacgaaatccaggatcatattgaacacgtttgtaatgacattaacagaactttcctggtagcgtcaaacggtttattgtacctgtttgaacgttttcagaacatggcgaaggtgtcaaacgacaaaggacaaacatggcattactacaaggcgtttaacgaccgcgtaggaaaccctgtatcgcgctctgttgcgtaccaaagccgaaacacaacctatgtactgggttacgatcgtatcttctacgggcgcacctcaacggatattcgctggtctgcggacgatgtgcgattctctgctgatgatgttacgtttgccaaactggggaaccagactggccttgatttcgatgtggactcatacaacacatttgctaaactgcctggtaacgtatcgaaatatgcagaagcaatggcatgttccgatgactggctctatgtggttgctaaaaacgttgtgcgtcgtatcgcactgaaacagacaccgatcgacaccgatccgagttctccaacgttcggagaaaagattttcgatactgacagctatacagttgtccctggaaatgataagatcgttgtcaagaaaatggatgtgatggatggtattctctatgcactcgtaacgggtgaagtgaaaaccgctctgcaagatcctacaaaacccgctaacgtggttccgtccgctgctgctggtgtgtatcaatggcaagaaaacacgaaaacctttgtgcgcctgtatgggaacaccgaggaagaacgtttttatatccagcatgaatacaccaatatgtcaacgaacggcacggagatttttatttccgtagcgaactacaaatatccaggcacacttcccgatcctgaattattgatcgagaaccctgcactggttggtgctgtaaaatatgatttgcgtcctggctatactgccagccttgcgattaactttgcgacgattcgcgctcatatcgacgacccgactgtttggaaatttggtgcgcaggaatactacaacgaggcgaactatagctggttcttccgcgactctgtgcgcacatggatcactaatgataaccgtcctctggtggtgtatccgaaaatcacctacagccttgtaaccgatagtgctggcccttcgtcatcgcttcgtgtgaacaaagaggtatgggatcgcggacatgttacgatttacattaacaacattaagtttaccggattcacgaagtatacgaacggtgtgttgttgtataagagttcaggcgaaatcattgggttctttgaattgagttatcgcgcccgtgacagcttaactattttctggaaaccagataacacgttgctgattgccgatctgattcagcaggaacgcgaaaaaccgtatacaccggatctgtcacctggtttgattgacccagatttaagccatatgattacgcgctttgcgcctcaaagctatctggatcagcaatattttgagaagttcggtgaatattatttgcagttcgtttcgctgggtgaaaacacctactataacaaactgctgaacctgatcaggaacaaatatccgcgtgagaagaacagcgtagaatatctgtggtcggaagtaaaccgccgtaatatctacctggataaaacgaagcgcgatcaagtggtacgtttctttgaatctcgttgcagtgatttttactcaacgaaaggcatcgaagcaagctataaattcctgttcaaattgctgtataacgaagatgtaaccgtagaaatcgaaagttcgaacactctggaatatgatattctggttcagtcaacgaatattagtcaggacatcgtaggccggacgatttacacaccaactgcaagagcaaacgtgacgtatatcgaacgccagtatgatgacggtcaattacgctggtcaatgactctgcataacgtgatcgggaacttccttgaagggcaggttgtcaagtctgaaaagactaacttcacgggaactattctgcgcggtgtgcgtggtaagcaaatggcgaacaactcgatcgactatttcaaccgtgggcgttcatactatgtgatgaaaattcgttcgaatctgccagcgtcacgatataaggatgacgttttacgattcgtgcatccggtaggctttggttttatcgggatcaccatgttaacggtgttcattaactccggtttgtctatgacacatagcgaaacgatcattgatattcttcgaaactatcgcttcgatagcggttatccgaagtattggcctgatcgtgtagcccgtctggacggtaacggaaaccagacatttgacctcgtaacaggcgaagcattatacgaaccacaccctaaagcggggcaaccgttcgatgttccaccagaatatgacgttgaagaacaaccgctgaatggtgtattaccttccgcgcgtcgatttgatcaaagtcctctgttcgatagttctgcggttaaatactctcagttccgtaacttagtggaaaaacgattgaaagacgacgcgggtaatcctcgcgatccgaatccaccgactcagagaaaggtagcataatggctcaacaaaacatctaccgtgcggttgtaactggtaagttccgcacggaaaacatgatgaactttcgcgaaatgatcggggatgaccccgatcataactcgatctatatgtcgatcgggcgtactgaacaatgggcggataacgaatccgatcctgaattcgcgcccccttatcctaacgatgatacagatggtatcgttgatatgtggacgcatatgatcgggatgacgaaagtaccaggcgaaatgattgatgcaatcgttccgcgtaaagactggggcgatactcgatatcctaacccaaaaatcttttacattaatgacatcgtggtagtaaactccgctccttataaccgtactgattacggtaaaggatggatggtgtatcgcgttgtggacgttcctgatattggttcttgctcaatctccagtatcacgggtaaagttgaatgtgtgcgcattggtggcatttggacaccgacccacgaatcggtcgaacctccacgcggagaagcgaacggtatcgacatgggtgacggctatatctgggaatatctctacacgatcccgcctgatgtggttattaaccgatgcacgaacgaacatatcgttgttccgttcccgaatgaactcgaagaagatccggttcgctggggttatgacaacgtgatcaagtggtatccagatatgtatgatttggtgttccgaatgaaggttcactcaatgcgattccgtgcgtacatggattccctgttcttcccgcaagcatctttacctggcaaccgtggattccgtcaggttagtgtaattgtaaacccgttactgaaaaaggcgcaaccgaccgatccagaagtaaaagcaacggggcagtattacacgaaagaacagcttgaacttgactcagggcaaatgatctacatggaaaaccgtcaaccgattattcgttctcctgatcagaccgaagaagtcagtattattttcgaattctaaggaaaaccataatggcatatcaaactggtaaaaaattaattgacgtggggcagatcggcaacccgtcaactggtgacccgctgtatgacggcggtgttaaacttaacgaaatcatcaccaacatgtacaacgcgtttggtgatgtgcgtttgttgactgcgaatgatggtgtgggtacaatgctgctccacgcgaccggatatttccagaaactaccacgaacctattattcaggcaacccgatcgaactgggttcattgcatgatatggatacctcaacaggcccgattacggtcgtgcttccatcgggtaaacccggtgaagggttctatttcataaatagtaacggtagcatttctgttgatcgtcctgttgtattccgtccgcaagttggcgatggtatcaaaggggttcaggatcagctttacataacctctccatatactcagattaaaatctggtgtgtgaagaaagaaggttctgtttctacatgggattattctgttgaatcaatgtttggttcaaagacaatgcctgttgatactaccaaactcattttgaaagcatcaccaacggctattcctatgtttggatatagcgaatttagcggcgctaaacttctcgtatacgcggaaaacatgacaggcacagtcaataaaacagcagaaattctgcttgccgtcgatcgtgtggctaagggcgtttattcaaccgaatacgcagttcttaaaaatacagaagatgaaatgtatacgcttaattttactgttggcgctggtgatgttgtttacgcaaacgtgcaatcgaaaaccgaagatcgtattaaattctcgatcaaagcggttgacaccatcaaatcagggatcgcagcatgaaacaagaaattattatcggtaacgtggttgacgatggcgcaggtgattatctgcgccgtggtggtcagaagactaacgccaactttaccgaattgtatgataagctgggtgatgggagtatcccgcatccagcgggtgcgtggaaaacgcataccgcgcctacgctatcccctatctttggtgattcatgggcgctgaacacaagcaacaaccgtattacggtaaaccttcctaaaggcagcgtaagcgattataacaaggttattcgtttacgtgacgtatggggtaagtgggcggcaaacaacgtccgtatcgtccctgcaagcggagataccatcaaaggttcaccgaactacaaagaactgtacaaagatttgatggatgtcgaactggtttattgttctcctggtcgttgggaatatgttgaaaacaaacaggttgacaaaatcacaacttcggatctggctactgtagcgaaagaaacctatatcgcgactcagggacaaactgacttcctgaatgtgtttggccctggtaactcttacaacgtccgcgcactggaagtttactatcgtggtaacttgctgtacatcgacgacaagaacgggtttaatgcatcaaacagcgattacggttcacctggtgcgagcgccggacaactgatcgaactggatggtgtaaacatacgtcttaaaaacccgtgtaacgctggtgatacgcttcaattcgttacctatctggatggtattgccgcatggcgagcgacgtatgaagcgcataccatgcgcgtatataacacgggtgacaccgaacaggtaagtatccctggtgaaatttgggttggcgatctgccgaataaactcacattcaccactgctgaatttggtatcagtccgcgaattctggttaacccgaactcgttcgaactgctgctgaacggtcgacagcttgttaaagcaggtgatgcggatctcccgacatttatttgtgagggcgcagaaggttatgacgaagatagctgtattgcaaactccggtttgtgggttccttctggtcaggattacagtctgatttttgttgattccgaggttactggtattaagtttgctcaacctctggaaactcgcgatgtggtaactattcgctggttcaacaatgatatcggcactgtaatggaatgggacggtgtaggcggtattaaagaacacaccgataagatttatctgaataacgaagaagaagtaacgctggttaatcagattgaatacaccgattataacaacccgactcagaaaaccgcgcgaaaagtcgcagaaccgtttagtggtcgtcttctggatttgcaagcgttctttgacgttattcacccaatcgggacaatctacgaaaacgcgcacaacgatgctaacccaggcgattatatgggctttggtatctggacacgttatgcggaaggaatgttccttgctggatggactaccgacgaagcagatagtgatttcggtttgaacaacaacgatctggatggttcaggtcaaccaactcacacttctggtggtactggtggcgaacgtggttatgaaattaaaccgattaacgttcctgaaatccattcaaccgataaggtgctgattaaggatgacaacgggatcattattatcggtggttgtcaggttgatccagatgcaacagggccaggttacactaaataccgtgaggatgtattaaaagtaaatcagggtaacactaccccagataaactaaaaacgctcccgccgtatattactgttcaccgctggataagggtagcataaatgacacagtttatttccaaaacaagggagggggcgaaagtcccttcccgcgaagcagattttttgcaatatgaaatgggttcgaaattaccgctgattggcggtaaacgtaccattggcggcgcaaacgtcgatcaacttcgaaaaggggtagaataccccaacgtacaatcagcaattgatgacttatattctctgtctgaacaaatccctattaatggggtagtaacaatggcagaagataattcaccgtctgcggttcagcaggtcgaaagcattacgtttgatggtactgttcagaacccagatccagatcagacgaaagcgactgttcatgtttacgggttcccgtttgtttttgacaacacaacgaacgcatcaaccgtatgcgaaaccgtttataacaaatttactgaatttgtgaacgatgaaaaatatttcgatctggtaactcgaaagggtttaaatggggagatcctagaagttcgttttattgacgcggttccgcatcctgtaacgaacacttccgaaaatgggatcagtatggtaggcacgatcgacgtacaggctaaatctggttatggtacatggtcgaaattaggccaagcagatcttccggttactcctgctgttacggtttactatttcaagcgtattgcataaggacaataaatgaacaacacaattaaccacgtaagcgataaatccgtttacgtgacatttgatcctgctggtacgcaatggcctagcacgtacacgaatgttcagcaagcgcttgcatctatcggatcatgggcgcgtactgatgttggcttgcctaatgccgcgcctggtgtgcgtggtattgctgctattgctacacaggaaatgattgatgcaggtacagacacacagacgatcgtaactccggctctgctggaataccgtctacaaaaccctcatgcatcacaaaccgtatgggggtacacccgttacgcaactgatgcagaatcagtaaccgtaacgaacgatctggtttcattaacaccgcgttcattgaactatgtgtttaacacccgtcagtcaaaagaaaacgtctggggttctgcaaaactgtcaaccactgcacaggcaacgtctggtactgatgacacgaccgcaatgactccgcttaaagtgaagcaagcaattgctgctatggttccggtacagtcaaacgcaactgaaagtaatttcggtttggtacagttggcaacagttgccgaagtccgcgcaggtactatccgtgacggtttcgcaatttcaccatacacgtttattcgtctgactgcaacagaaaccgatttaggcttactccgtatcgctacacaggaggaagtaaacgcgggtactgataacacaaaagcaattactccgcaaaaacttgctgctgtgaagggttctggctctgcatttggtttggttaaattatcaacagatgtcaacaccggattagcgaataccgcgttgtctgctggcgctaacgtagttccaagcaacagaaacagtgctatcactggcggtgcgctgtatcagggttctattgttgctgacaataaataccagacacaaagcgacgttgaagtaaatattccgatcggttgtatgatgctatctgcatttaactccgactatggaaatatttttatctgtaacggacgcgcaatgaaccgcaacacataccctgttctgttttcccgtatcgggtatacatacggcggtgctggggatattttcaacctcccagatatgcgcggtgttgctgctcgcggtttcgatgctggacgtggattagatcctggacgtggtttcggtacttaccaggatgatatgtttaaatcccacgaacaccagttacagatgatctatcgtaatggtggtaatcttccgtcatccgaagcaatatacgaattgaaaaattcagaaaagaacgaccagttaattatgcaactgaatccagcatacactaaagctatggcaactggcggaaacgaaacgcgaatgaaaaacgttgcagtcaactatgtaattcgagtacgataaaggggttaatccatgatttcaaaacttaacccgttaccaaagatcccgtttgttgatggtgtccctacggacaccacacaaacccagatcaattggattgttaacggcgaaactctcgatggtgctaaaaccaaaaccactaacgagggttctttaaacagatgcggtgttctggttcaaaagaacgcggtacaattagaagcaaacacaactacccagacatcaaaaatcaacgaagttatcgatcaggttaacctcattaccgaaaacctcgcgacaatctccgatgaaagcgtgatcgacaaactggataaagttgtcgctgatgttgacgtgctgaaagtagatatgtcttctgtacaggcaactacagcaagccacactctgaaaattcaggatatcgaaaaggaaattggtgtatgggatgcaacaaccgatcctaaacatcgcacgattcgaaaagatatcattttcctgaaaggtgaactgggggcgtatccaggcttcaacgaagatggtgatgttgatccgtcctctactggctccggcgtgaaatacaaggtaatggcgaacgctcaggcggtatccatccacgaagcacgtattactaagctggaagatgactgggtaaactcagatgtaggtcaattgactgatgaagttacggatctgcgtaacgaaatggggccgaagcatttagcaacgtttgaatcagtttatgttcgattgaaccatatcggtgacgatatcactggcattaacaccgaactgtcaaacatcaacacgtatatcgggcgcacgggtacaggcggatcaggtagtattgattcacgcatgaaagcggcagaaacgaacatcgttactctgcaaacccagatgaatgatccggttgttggtgttctgcctcgcgtaatccttctggaaagcgctgttggtaactcgcaggttccgggtagtatccgttacgatatcagcacaatgaaacgtagcattagcgatctgaatatgatcgttggtgaaacaagtgatgatggtctgcgcggtgaaatggcacaggttatgaccgatatcggtactgactcccagccaacaagcatcaaaggccgtctgcttaatgtggaaaacacacagcgagacgatcaccaggcactgattgatgttaccgcaattgtgggtaatacgtcaactggacttgttgcggctaatatcgcgatgggtaaagctgtttatggtgacgcaaccagttctgatccattcctcaaagatggtattcagaaaacggctcgcgacaacaaaacagcaatcggtgtgaaaactgctggctctgaaacaggtatctataagctgatcgctgatctgactactcgcgttgctgctctcgaagctgctggcggtggtggtaacgttgaacaacgtctggacgatctggaacagaataaagcctctcaccaggatgttactgatgctctggttccgtatatcacagaagttgaagcggataacaaatacgaagcgaagaaagttccattgtcatttactcaaaatctggtcggtcgtaacgattatatcgagggtgatgatatttctttatctgttaccgttacaggtggtaaactgccttatgtgtaccagtggaagaaaggaaccgaaaatatcgggactgattcaccgagtgtaatgatccaaaacatcacaacgagtgattccggcgtatataaagttgtcgtaaccgacgctgaaaataccgtgattacttctgatgaacttgacattgcggtacatacggttcctcagttcgatacaaacttgagcgatatttctgttgttgatggtgacccattgactctggaagtagtgtttagcggtggtaaacccccgtacacttacgtatggcataaagacggttctgtattgactggtgaaactggttcttctatcgttaaatctgctgcaaccagcgcagatgcgggtgattactatgtaaccgtaactgacgcgatgaacagtaccaacgattcagcaaccgcgactgtgactgtaactactcgtccggctctggcgtttacaacggatcttccggcaacgaagagttacacaacaggcgataatatggatttagccgttgttgttactggtggcaaaacaccatatacatacaaatggtttaaagatacggttgaagttactggggaaactggcgcaagcctggctacagtagcagaagcgggagtatataaagttgaagtgactgatgcactctcaaccaaaattacctctgctgaatgtactgtgacggtagcataattttaacaaggggcgcaagccccttttgaggatcatatgattacgaacaatccagaacagttaaaggatgaaattcttcgtcgtctgggcgcaccaatcatcaaaatcgaaatcacacaagatcagatttatgactgcattcaacgcgctttagacctgtatgcagaatatcattataacggcacaaacaaaacgtatctgattttgacactgggtgatgataacccgcgcaacgtattcgacttgagcaaagaacacatcttcgcgatcacgaaggtattgcgcacaaacatgggttcattgaccacaatggacgggacagcggtttatccgtggtttaccgatttcctaatggggcttactggtggttctctgggcggtcgatgtgcatcaagcgtgtacggtatgaacgcatacggtgcggatatgggatactttacccagatgatgtcctatcaacgctcaatgcaagacctgctggctccactgcctgattactggttcaacgatgatactggtcagttctgcgcatgggggcaggtgaacaaaggcgacattatcgttattgaagcgatggttcgttccttcgttgatgtccctagctccgtaggaagcgtcgcaggatacgctacagcgggttctaacgcagtggaagaccaatccatagccgacatctacgaaaacccgtataacagcgttgtaggcggtgtacgagcgggacagggttcaactgttacgggcggaacgtctgcatataacaaccgctgggtaaaagactactctaccgcactggtgaaagagatcaacggacaaattctggctaagttccaggggatgcaattgcctggtggtgttgctccagatggtacgcgactgatccaggaagcggaaaccaaactgcaaagtctgcgcgatgaactgatttcgatgtctgacgcagtaccgatcattatggtgtagggggaacaatgcaaaactgggatgaaagtttattcgctcagttgtctacgggggaaggggttgatcgcaacttaaaggatcaggtcactaacccgtatgtaaactggtacaaatacaacccgacacaacagctacacgattcactgacagcagaatcaatccagatgaaatcgcctgatatgtattacgtccggcgtgacttcgtgaatattgataagatcctgggcgaagaccgagaatccaaatttacgaagtcatggaaaattgctgcttatattgaatcgtatgccaactatgaagggcaacgagatttctttagtaaatttgggttgagttcaaacgatgaaatgacactggtaattaaccctcgtttgttcgcacatcaaactgatggtggtattcctgttctgggggatttggtttatttcccgatggacaatagcttgtttgaaattacgtgggtagaagccgatccgttctatcagttcggtgatcgtcctcaacgcaaaatcaaccttgcgaaattcatttacacgggtgaagaactggctcctgaattgcagcgaaatgaaggaatccatatcgaacctgatgcagaactggatctcgaaccaattcgaaatcttgacgggctggctgatatcaacattgaacagtacgaagaagacaaagaatttgaaagagaaggtgatgaattcatcgaatcttttgatgttgtcaacggacgcggttcaccgtttgcaagtctgccataaatacgttatatgggtataggcggaagtctataccctcttcgaagaggattttatgatatacgcaaaacttaaagaatggttgcctcatgatctatacgttgagtatgttgatatcataaaggcttctccaaaaactgaacacacagaaaaacatcatatattaccacgttctttatttcctgaattcgaacacgaaccggaaaatttagtagaacttgatataatgaagcatttgatggcccacaggacattagcaaaaaccaatgatcctaaaatgattcttgcgttcttcatgatgttcacctatgaacacaaacgctattcatcgttatctgaacaagaacagcagttcattcttgaagaaaagacaaaggcgcgaaaagcaatgcgcattgttaaaaaagaacagatgaaaggcaaacatgacggtaaaaacaacccattttacgggaaaaaccataccgacgaattcagaaaaagaattggtgctgttcataaaggaaagaagctatcaccagaacatatagcaagtctcgttgctgctcacaaaggcaaaaaacgagaaaaggtacgatgcccccattgtgggataatgtgcgccgctaatacagcgaagcgctggcactttgataactgtaagtctggacgcgtccagcagggggattagaaaatttttggatactggtacaatagttcgctgcgtaattatatcgtcctgatgggggcgctttttaatcacgttcaggttaaaagagtacgcggcgatcaagaaaaatacatcaaggttccgatcacctatgcatcgaaagagaagtttctcgcttccatgaacaaacttaactacacgttgagtcaggaaaacgttgctaaaacggaaacgattttaccgcgcatgaacttatcactggtggatctgcaatataacgcaatccgtaaaaccagtatcgcggtcaaccaaaaaatgacacagttagcaaccccacgaaaaacgatcacacagtttaaccctgtgccatatcgtctgattttcgaactgggtgtgtatacgcgatatgaagatgatatgttccagatcgcagaacagattttgccatattttcaaccgcatttcaactgcaagattaccgaactgcataagaacgaaatcacagttgaccgagacatcaaaatcagtctccaatcggttgcgccggataccacattcgagggcgaagcatcacaacgccgtcatgttgagtggtcattcatgtttgaattacagggttatctgtacccgcctgtaaccgatgtcaagggcgaaatcagaaccgtttacacggatttcttctctaacatgaacccgttagataaagataactttgaatccgtggatagtcaagccgatccggtagatctgcctatgcaggactacacgggcgaagaatatattcagacgtactcgcacgataagccgatcccgtctggtgatgaacctcctaagccgagggaatgagaatggatgaaaaattagatttacagcaattgctgaatatcgattccctccctggcggcgttgagtctggggaggatgtggttgtttacgagaaacttgaactggttgatgttcaatcacatccagcagaccggaaaccggatctggaagaggattatacgctcgcgcgtaagactgcgcaccatatgaatcagatgatcatggatatggcgcagatcgcattacacaacgcgaagaactccgaatcacctcgccacgtcgaggtattcacaagcctgatgaatcagttaaacgtttcaaacattggcctgatgaagattcacaaagaaatgcgtgagattacggaagagactacaaaaccaggtgctgaaaaaggcggtggtggtagtgaaatgaatatcgagaatgcaaccgtatttgttggttcccctacggaactgatgcagaaatacggcagtgcatatgaacccaaagagggcttcattaatggtgaagctgtagaggtaaaccctgatggaaatggaaccgacgatcgatccgagtaaggaatcagatcaccctatcggattaatgcatcccaaatatctgaaaaagaaaattgatgaattggggatggagtggacacaaagcgaacacgataaaaaatggtatccgacaacgttcagtgactacctgaaaattaacggcattcaaaaggtcgatattcagtctaaggacagttcgaactttgccacgtacaaaaataaaggcaacaagaaaacccgatataacggcaacccaaacctgaaacgtgcgtatatccagactaaatggacgcaacaaatgttgatggagtgggtgaaatgtcgtgatgatatcgtttattttgctgaaacatattgtgcgatcacccacattgactatggtacaatcaaggttcagttgcgtgactatcagcgcgaaatgctgatcgaaatgcacaaaaaccgtatggttgcctgtaacctgtcgcgtcagttgggtaaaacaaccgttgttgcaatcttcctggctcatttcgtgtgtttcaacgaagataaatatgttggtgtgttggctcacaaagcctcgatgtctgcggaagttctggatcgtaccaaacaggcgatcgaactactgcccgacttcttgcagcctggtattgttgaatggaacaaaggttctattgaacttgacaacaaatgtaaaattggtgcgtttgcatcttctcccgatgcggtgcgtggtaactccttcgcgatgatctacattgacgaatgcgcgtttatcccgaactttgttgatgcgtggttagcgattcaaccagtaatttcttctggtcgtaaatcgaaaatccttatcacaacgacacctaacgggcttaaccacttctatgatatctggaacgctgctatagaaggaaaatccggcttcgtgccttacacggcgatctggacatcggttaaagagcgattgtatacagacggtgacaacggcgtatttgatgacggttattcgtggtctgctaagatgatcgctggctccagcaaagaggcattcttgcaggaacactgcgcggaattcatgggaaccagtggaactctgatcgctggctggaagttgtcaaaactcacatggatcgatattgatgaaacggaaacgaacttttatcagtataaacgtccagtagaggggcataaatatgttgcggtgcttgatccagcggaaggtcgcggacaggattaccatgcaatgcacatcatcgacattacgacgatgccatttgaacaggttgcggtgtatcactcaaacaaaacgtcgcatcttattttgccggacatcctgttacgttatctgaatatgtataacgaggcatggatttacattgagctaaatagcacagggcattcagttgccaaatctctgttttccgaactggaatatgagaatgttatttgtgacagttacaacgatctgggtatgaaacagactaagcgatcaaaagctatgggatgttcgacgctgaaagacctggtcgagaaagataaattgatcataaataacaaaaagacaatactcgaatttcgtactttctcagaaaaaggcgtttcgtgggctgcggaagaaggatatcacgacgacctcgttatgtcgcttgcttgtttcggttggcttacaactcaaatgaaatttgccgaattctgcgagaaggacgatttaagactagccaatgaagtttttgcacgggaacgcgaacagctatacgaagacgcattatgtccggttatcgttacaagcggtgatgaaacgatttcggttggttctcacggtatttcgtttatataaattagaggaaattctataatggctttacaatctccaggtattgaaaccaaagaaacatcggtacaatctaccgttgttcgaaattcaactggtcgcgctgccattgtcggtaaattttcatgggggccagcttatcagatccgtcagatttctaacgaagtcgaactggtaaactattttggttccccagacaacttgaccgctgactatttcatgagtgctgttaacttcttgcagtacggtaatgatctccgcgtggttcgcgttgtcgataaagatgccgctaaaaacgcaagcgcaatttttaaccagatcaaaacaactatcgcatcacagggttctaactacactgtaaacgatactattaaagtaaaatacaacagcgttgttgtagaagaaaacggtaaagtgtccaaagttgacagtaacggcaagatcctctcggtaatcattccaagcgaaaaaatcgttgcccgtgctaaacagattggtacttacccagatatttctactggctggactaccgaaattgtttctcagtcttccggtgtttctgcgtcgattacgattgacggcatcgaaagcgattctgggatcactctgttgaacctggatattgcaaaagaaacaattcagggaaccgctttccagactcttacccagaaatatcagttgccgtctgttgtggctctgtatcctggtgaactgggttcaactgttcaggtggagattatctccaaagctgcttacgattctggcgctatgatttccggctacccttctggggtttccgttaagaacagcggtcgttctgtaatgacctacgggccacagaccgataaccagtacgcttttgttgtgcgtcgtggtggtattgtacaggaatccttcatcgtgtcaaccgagaagaccgataaagatatctatggtgtcaacatcttcatggatgactttttcgcgaacggtggctctcagtacgtttacggtacttccctgaactggcctaaaggcttctccggtatcctggagttcggcggtggtttgtcctcaaacgatactgtaggcgctgatgaactgatgaatggttgggatatgttcgctgatcgcgaagctctgcatgtgcctctgttgattgctggtgcgtgtgctggcgaaaccgtagagattatgtctaccgttcagaaacatgttatttcaatcggtgatgaacgtcaggattgtaccgtgtttgtgtcgcctccgcgctcacttctggtgaatatcccgctggcaactgcggttgataacatgattgaatggcgtactggctataaactcagtggtggtgctgctgttgataacaatctgaacgtaagttcaagctatggcttcctggatggtaactataaatatcagtatgataaatacaatgacgtgaaccgttgggttccgctggcaggtgatatcgctggcctgtgtgtttacactgatagcgtttctcaaccgtggatgtctccagcaggttacaaccgtggtcagatccgcaactgtatcaaactggctatcgaaccgcgcacagcacatcgtgacgcaatgtatcaggttcagattaacccggtaactggtttcgcgggtggttccggcttcgttctgttcggtgataaaacactgactaacgtaccgagtccatttgaccgtatcaacgttcgtcgcttgttcaacatgatcaagaaagacatcggtgataacgcgaaatacaaactgtttgaaaacaacgacgatttcacccgttcttcgttccgtatggatacaggtcagtacatgactaatattcgtgcgctgggtggttgctacgattaccgtgtaatctgtgacaccacgaacaacacgccggacgtaatcgaccgtaacgagtttgtagcaacggtctacgtgaaaccgcctcgttctatcaactacatcactctgaacttcgtagcaacgtctacaggcgcagatttcgatgaactggtaggaccgcaagccgtataaagtcaagggggctgaaaagcccccataaataatccgaggttaaaaatgcttactgacattttacgcgcctttgaatccggtgatttcgcacgtccgaacctgttcgaagtagagatcccgtatctgggcaaaaactttaaattcaagtgtaaagcggcaaccatgccagcggctacagttgaaaaagttccggtaggataccaaaaccgcaaaatcaacgttgctggtgaccgtacctatgatgactggacaatcacgatctataacgatgacgcacataatacgcgtgacgctctggtagcatggtcaaacatgatgcacggaatgggcgatcagattagtggtgatattccagcgaactacaaaaaaaccgctacggtgaaacagaaaaaccgtaacgatgaaattaccgccgatcacaccatccacgggctgttccctactaacgtaggcgaagttaccctggactgggacagcaacaacgaagtgtcaacctttgaggttacgttcgcgctggactggtgggaataaaggttataaatacaggggtagcaatacccctatcattatttttcggagttactatgaactttttgggctttggcaatgtacttagctttttcaagaatttcgcccgtgaggacgaattagatcttgaacagcaattaaaaaatgatacaggttcggtcgcgcctcctaaaaataatgatggtgcttatgaaatcgaaactgatctgactaatcagaaatacgcaagcgtattccagcagttttattctggacaagatccggcgattcagaacaaagaacaattaatcaatacatatcgcggcatcatgtcttacccagaagtagaaaacgctgtttctgaaattattgacgatgcgatcgtgaatgaacagggcaaagatatcattactttggatcttgccaaaacagattttagtaaggcaatccaggacaaaatcgtagaagaatttgataacgttctaaatatctatgattttgataacatgggtgcgcgtctgttccgtgattggtatgtggattcccgtatatacttccataaaatcatgcataaagacgaaagcaaaggtatccgcgaactgcgtcaacttgatccgcgttcgatggaactgatccgcgaatctatcactgaaaccctcgatggtggcgtgaaagtattccgtggttatcgcgaatttttcgtgtatagcgctcctaaaaatggctatacatacaacgggcagatctaccagcataaccagaaggttaaaatcccgcgctccgctatcgtgtatgcgcattctggtctggaagattgcagtaacaacattatcggatatctgcaccgcgcagtcaagccagcaaaccaattgcgtttactggaagatgcgatggtcatctaccgtatcacccgcgcacctgaacgccgtgtgttctacatcgatgtaggtcagatgggtggcaacaaagcgacacagtacgtaaataacatcgcacaggggcttaaaaaccgcgttgtgtacgatgctaaaacgggtactgttaagaaccagcaaaacaacctgtcaatgacagaagattactggttaatgcgtcgtgacggtaaagctatcaccgaagtagacacgcttccaggcggtgcgaacttctctgatatggatgatatcaaatggtttaaccgtaagctctatgaagcactgcgtgtgccattaagccgtatgcctcgcgatgatgggggtatgcaaattggtgggggtggtgaaatcacccgtgatgaactgaaattcagtaagtttatccgcacactgcaaattcagttcagccctgtgctttccgatccgttaaaaactaacctgatcgcgaaaaaaatcatcacagaggaagaatgggaagaaaacgttagtaaaatttccttcattttccagcaggattcatattacgcggaagtgaaagatattgagattatggaacgtcgcctaacgttgatgtcacaggttgaaggtgtagttgggaaatatgtctcccataaatacatcatgaaagagattcttcgaatgtctgatgaagacattgacgaacaagcgaagctgatcgaagaagaatccaaagaagaacggttcaaaaatcccgaagaggaagaggaaaacttttgatgaaagaatttatcgaagcaatcaaaagcggtgatctggtggaagcgaagaagcaattctattccatcatggaagaccgtaccgaagcccttcgccaagaaatgcgcgttgaactcgcggaagctgtacgcatcgaaggtgaaaccgacgatgacgacagcgatgacgatgacgacgacaaaggcggcgatgataaaggcgacgacaaagacaaaaagccgtctgataaaaaagacgacgataaagacgaataagaggtgtaaataatgcaactcgaactcgaagaaatcagcgtcgaagatctcgaaccccatttaaccgaagcgaaagcccgtgttgatgttctggggatcgatgacggcactgtgaagatcatcgaaaatttggcggtcaatgaacctcatttagccctggctatgatgtccattgtcgagggtttgagtttagatgaagtcattgttaaacacgtagattcgcgcggtaatgtggaacgtaaaaaagaccgtaaaacccgtgaacgtaatgcgtatcaaacaactggtttaactaaatctcaacgtcgccaaattgcgcgtcgtgcgctaaaaacaaaacgtgcaaacccttctattacaacccgcgcacagcgtaagcgtaaaaaagcgctccgtaaacgcgccgcattagggctataaatatgaatgaatcccaactcaatgaaaacggcgatatgctgctaatcgaggaatggggtttaccttgtgcggatatttccgattcaattttagaatcggtcggtgagtcgaaaaaagacggtaaacttcggattgaaggtattttcctacaagccgaaaaagtcaaccgcaataagcgactgtatccgaaaaaagtattagaagaagcagtaaacgattatatcagaactcaggttaatacccgtcaagctctgggtgaaatgaatcacccgccgcgaccgaatgtcgatccgcgtaatgcttgcatcctaattgaaaaattgtggtggaaaggtaatgacgtttggggtcgcgctgttgttgtcgaaggtgataacggtgatggggataaactcgcggcgttaattcgcgcaggttgggttccaggtgtttcttctcgcggactgggtaaactttccgattctggaaaaggttacggtatcgtacaagaagggtttaaattggcagtaggcgttgatgttgtttgggggccaagcgctccagatgcttacgttaagccgattaccgaatctcagtcaagcaaaccgcttgttgagaataatagtgctgatgatgacgctttcagaaaactctctgaacgtttgaaaagtctatataaataatatcatatcaaacaggaaacttagaaatgcttaaagaacaactgttggcagaagcccagaacctggataccccagttgagttagacagcattttcgaatcagttgaactttctgatgatgcgaaagcaaacttcaccactgtattcgaacaagctgtaaaagcaggtgctgcgaaactcgctgaaacccacatcgcccagatcgcggaactctccgatgaactggttgaagcccaggttgccgaaaaagctggcgaaatcgaaaataaactgtacgaagatgcgaataaatacttcgaccacatcgcgcaggaatggctctctgaaaacaaagaagctgtgtcccgtgatatcaaggccgatctgttcgaatctctggtaatgggaatgaaagaactgttcgttgaacacaacgtagttatcccagaagcgcaggttgatgttgttgcagaactcgaagatgaactgaccgagaatcagcaggaagttaaacgcctgttcgaagctaatcaggctcaggctaaagagatcgccaacatgaaacgcgataccatcgtttcagaaaaaacaaaagatctgactgaatcgcaaattgaaaaggttcagaacctgatcgaaggtttggaatattccgacaagttcgaatccaaactgaccgcaatcgttgaaatggtagcgactaaagcggaaaaacaggttgaagagagtaccactactcagacaaccactaaagatgactttgttccggtgaatgaaaatacacctccagcagagaaatcgaagatcaataaatatgtacaagcggctaaagccctttcctaatcttataaggtaagaaacaatgtctaagaaaaacgaattgatggaaaaatggaacgatcttctggaatctcaggaaggtttaccggatatcgctaccaaatccaaaaaacaactggttgcagcaattctggaaactcaggaaaaggatgctgatactgatccagtatatcgcgacgaaaaaatcgttgaatccttcggcggtttcctggcggaagcagagatcgcgggtgatcacggttacgacgcaaccaacattgcctctggtaaatccagcggtgcaatcaccaacattggccctgctgtaatcggtatggttcgccgtgcgattcctaacctgattgcattcgacatttgcggtgttcagcctatgactggccctactggtcaggtgttcgcactccgtgctgtatacggtaaagatcctctggctggcggtactcctgcaaacgttcgtgaagcattccatccgatgttcgctccagacaccatgtattctggtgaaggtgcaaacaccgcgtttgctgctatcgcttccggtactgctatcgcttccggcgctatcgttaagcacgtattccaggaaactggtgtcgcgtacttccagaacgtaacctccggcaacgtaaccgtaactggtgctgatgctgctgctctggatgctgctgtaatcgcagaaaacgagaaaggcactctggctgaaatttccgaaggtatggctaccagcgtagcagaactccaggaaaacttcaacggttccagcgctaacccgtggaacgaaatggctttccgtatcgacaaacaggttatcgaagctcgtagccgtcaactgaaagcacagtattccgttgaactggcacaggatcttcgcgctgtacacggtatggacgctgacgccgaactgtctgcaatcctggcaactgaaatcatgctggaaatcaaccgcgaaatcgttgacctgatcaactacaccgcgcagattggtaaaactggtttcacccagaccgtaggctctaaagctggtgcgtttgacttccaagatccagtagatattcgcggcgctcgttgggctggtgaaagctataaagctctgctgattcagatcgacaaagaagcgaacgaaatcgcgcgtcaaactggtcgtggtgctggtaacttcatcatcgcttcccgtaacgtggtttccgctctggctcgtatcgacagcggcatcactccggcaggtcagggtctccagaaaactctgaacgtagacaccactaaagcggtattcgctggtgtactgggtggcacttacaaagtgtacatcgaccagtacgctcgccaggattacttcaccgtgggctacaagggtgataacgaaatggatgctggtatctactacgctccatacgttgcgctgactccgctgcgtggttctgatcctaagaacttccagccagtaatgggcttcaaaactcgttacggtatcggcatcaacccgtttgcgaactctcgctctcaggctccggcagatcgtatcacctctggtatgatcagcaaagaaatgtgcggtaaaaacgcatacttccgccgcgtgtgggttaagggactttgatcctaagttgttgaaaaacaacgactttttaaagggaaccttcgggttccctttttgtttatataaatagtgaaaacatttgaggctatattatgaaacatatcatttataaaataacaaacaccatcaataacaaaatatatgttggtgctcactcaaccgaagatatcaacgattcatacatgggttccggtattgcaatcaaaaaagcgcaaaagaaatatggtatggaacatttcacaaaagaaatacttcatgtatttgacacccgtgaagaaatgtatgagaaggaaagggaaatagttgatattgaattcataaatcgaccagatacatataatgctggtattggtggtaaaggtgctccaatggcattgattggatggagtgatgaacaacgcaagctgatttctgaaaatacttcgaaagctatgcaagctccagaaatgcgcgaacgcctttcaaaaatcaaaacaggaaagaagcaatcggaagaatccaacaggaagcgttcagagactatcaaagctatgtataagggttctgcattcgacagaaccggatctaagctcacagacgcgcacaaggccaaaataagccgttctgtgtcgatagatggagttgtttatgcaagtggttctgatgctgctaaagcgttggggctttctcgatctggccttgattaccgtttaaagagtgacaaatttcctgaatggaaattcgttgcataaataaacaatatactccctataaattcaggaaccaaagaaatgagtgataaacactacacaattcacaagttgatgcgtcagtcttcgcttccgtctggtaaacgagaaaaagttatcaacgaagcaacaggcacgaccgacatcaacgtacagaacacgcgcccagaactggtttctttgactcgcgcggttaacaacctgatctatcatgaactggttgctgtacaagaaacagaactccctgttgcaacactgttcggtgttcgctatcgcaaccctaatggtgatatgactttctccagtgctgcaacctattcaggccgaatctctggacgtacagacatcgacgaaatcgatctgactaaagcctacgttaaaggtgatttgttcaagcatgacggcactgacgttgtttatgaggttatcgcaccgattaccctgaacactctggatactgacaaagacaccgcgatcatgaaagctgtgttccaaagcaaaattcgtctggtgagtgaagccgctgatacttctaagtatgaaaccagtgaagatatcgcgtcaacctccttccagatggatcgctggaatattccggtacgctcgcgtaagtttaaaaccgaaatgacggttgaactgatgcaggatttggaagcgaaccagttcgaagctgatggggtgatcgaagacattctgggaaccgtggcaagtgaagaagtcaacaaagacattattcaaacactgatcaccgtttccaaacgttacaacgttgatggactcgttacggatggtatttttgacggtactaccgcatacaccgcgaaggatgctccagcattgggtcgtatcctgtaccaattagcgtgtgaaatggggcaggaaatgaatagaacgacttcatttgatgctacctacgtcctcgcaacagcgcgtgttgtaggcattctggctgcgtctggttggatgcacgaaaccgacgaacaacacccactggcaacaggtaagctgaacaacggttattatgtctatacagacacaaacagcccgttcgattatatgctgactggctgcaaatatgatctgggtgatatggatcacgtaggctctctgttcttcgctccgtataccgaagctgatgaagcaggttcaatcaaagtatccgtagatccggcatccctgcaaccgaaagttgctattctgatgcgttacggtctttccgtgaacccatacacagcagaaagcgaatccgatcacctgatcaaaggtgatgattggtctgctcttgcaggtaaatctaagctgagtcagatcgtaggtattaagttacctaaactgtgttaacaagttttgttttgagaagaccattatagtaataaagatctataaggtcaaacgagcgaagcgagttttcacgaacgaagtgagtgatgggtaagtacgatgtactgtttataatatttatattttatatatagagaaaacagtacattttcgtatactttttaaccaacattcactcactacgttcgttcatgtactcgcttcgctcgtagatttgacttcttgatctaactggttataatgttactttgttttgaggtgatacatggctgaactaaaacttgaagatctacaggctgaacttgaagaggatatgcgtattgatccgttgaagttacaaagcgaatcagcagacattccgaagatttggtcaaaatggcttcgataccattcgaatgctaagaaaaaacttattcaactccaggcgaagaaagaagcgattgtaaaagatcggttactgttctacactggtagacacgaaagcgaaatgaccgatgtcatttacactggttcgggtgaaatcaaaattgctatctccggtgatcctaagaccgttgaagttaacaagctgatccaatacttcgaactgattgcagagtttaccggaaaagcgctggatatcgttaagaacaaaggctactccatcaaaaacatgttggagatccgtaaacttgagagtggtgcataaaatggcagaagaatttgattgcaaatgcgttgtgtgcaaacaaccgatgaactcccgtaatacggcgtttgtcaatgaagctggtccgatctgcggtgtcgtatgtttgcaatatctcaacgaaaggaatgatcgcggtatcaatgaagccgacgatctgaacgaagttcaaatgttgctgtaggtgtgaatatgaaagactattcaaaaatcgactttaacgaagtatttcgtttgctgggattgatggaagaatgtgtgaccagggttcatgcacttcgaatttcgtttgaaagtggttgtatcgaagacgaacgcccagatttatagcagtaaatataattgtagggcaagggcatgtttaccgatggatgcattttcataatcggataaacctaatggcctatatggaatgcaacatatattcgtgattgggatttttttctcaacctggaacctttatgctaacagtgtgcaacggcacgaactacgattgactaccccgcaaatatacgattgcatgttgcggcgaatgtgtcacagtaccccttgtggggcatggctggctgattaatcagcttacgcagtttagaatagcggtgacgacaccgcgttaaaaatcaactatgcttcaaaattaaaaagccccttcctttcggttggggctttctttttaaaacttctcttcttctccggtttcaagttcggctttcagttcttctcgccgtcccttgatcgcgtcacgcattgaaatgtcatcggatgctgcaacctcgacttctttcacgcgggtgttgtaatacttttcaagttctttcaaaccttctagtgtccggcacgaagcaaccttattcatgaaatcatcaatcgctgcttcgtttacgaatgtagtaaaacttttcattttggcctcttaaatttctacctgtttgatcgcgtagtcgaatcgttcttcattgtagatccgcacacgttccatagcatgtttcataccgtagtttgtcgcactgtatttatttttggctgtcttagactttgacagcgtagccaggttatcaacgatatcccatacagtagcgagcgctttcgatccgtgcttacgaagtacacgaccgatagactgtttcaccacaacagcagatttgcaagggtgcgcaaaaatgatgtggtgtaggttcttgattgagatacccgtactcagtaccccgatcgaaccgatgacgattaaacctttcgtcgattctgcaattttcttcatttcgttacgatcgtcaatgtctgtatcaccattgaccaacaccacgttatcgtaaaccttgctcaactgctcgtacagccattttccgtgctctttgtaccggaacatcacaaaggcgttttcgttcttctcacgggctaatttgagcgctaattttagaatccacgcgttgcgccgtgtgtggctggttacgtacttgatttccgtctggtagtccgcacccttcaattttttgacctcttcttctttgtatcgaaggaagatcgtgttaattttcaggttggtgacttgtccatcatccatcaaacgacgcgtatcaactggtttaaagactttgccgaacgcaccgatgtattgcatcatgttcgttttcccttctttcagggaaccggataagcccagtttgaagatacattgatccatcgtgtcgataatctttttgatgctcatgcctgttgagaggtggcattcatcaaccatcaaacacatgaactgttggaaccattcggcaggcattttaaccgctgattgccaggtagaaacgtaaatcagtgcattactgtttttcgctgtaccggaacggatacccagcattgccgatttcgggaacaaacgatagtttgcgatgtcctcgatcatttggtcaacaagtgcggtagtcggaacgatgatcaacactttcccgctgtaatgttccagacaccaacgagagataagcccctgaatcagagatttacctgctgatgttggcaggttcagaacaccgcgacggtttttgataccgtggaacactgattcgcgttgataccagtacgggtcgatctgtttgtcgccgtcataaaccggatgttcgctaacccacttatcaaaatcttcttgcgtgatatcctcagtttcgtggatctttggatcaacccagattgaatacccgcgtgattctgcgaatttggataccagataggctaacccatacgggagtttcccgttgtagtccatcaagtaaatgtaaccgttccatccaccatatttgtatttggcctgatactgatagcctgggggctggaagctgaaatagtcacgcagttcatagacaatgtttggttctgcctgaatctgtacgtggcttgtgtttaaaaatttgacttcaatatccactatgattaccctatgtacaaagtatatacgtatttatgtcataaatattggataaacacttggagataccaatgaacattgattacgaaaaagttgatgggttccgtaccctcgacgcaaaagaacagaaaggcgctttagccgattacgctatgactgtgtttgcggttaagctgaacaaacaaaaatccttcgataacatgctggcggatctggttgctgctttaccggaagatgaagaaaagccggaactgctgatcgattcaccagaaccggaaatcgtcgcatataaaggtgaggtgactatgggtgaacctgtcatcgaagccccgaacgttcccgatgtggttattgatgcttctgcggattttatggagtacgttaaagaggtcgcgccggaagtagccgatcaaatccaattagtacctgatgtcgtagaagctcctgtaagcgcttctgacgagtccaaaggcgaactggtatggttggaagggtttagcccgacaatcttcatgatggggcgctctgcgagttctaacgggtattatacctgtccgtggtggatctatgactggattaaacaaaccccagactggtacaaagatcctgatagctgtccacatgcaagcgcaatcgacacaatcaaatcacttgcgttctatatcgtgcgcgatggcgaagttcgtgttcgcgaaaccagaaatagccgattcgaaacatttaagttttagcactttttgctaaaaacttgttgacgcataccctcgtttaaagtatatttgtactcgaaggcgggggaatggctctcgcagtgaagaaggaaagcaaaatgaaaaacgaaatgatgaaaaatgcttactacccagttctgtttgtttgggctgatggtaaagtgaagaaagtagtcaattcaaatgctccttactatactgttgaagaagcactgcgccacgcttacgaagctgattatcctgtccctgctgaacctggttatgctcgttggaacggttcaaaatgggttgctgatacctgggacaactacgaagaagcaaaaatggaatgcgatcctgattatgtttctcgccaaatggaagcgcacatgattgcagaccgtcgcctggataacgaagctcgcggtttctattaaaattcaaagggggctacgcccccttttttgtaggtaaaatatgactgaattaaatcacgaatgcctgaaagacttatcagaaggtaaagagttcggaaacgtcatcttccttgatatcgacggcgttctaaataatatgcggtgcatgaaatttggtgagcatatggacattgaatgtgctcgacacctgcgccggatcgtaaatcatgctaactgtgatattgtcatttcctctacatggaggatcggcaacacaacccatactctacgggaaatcttctacccgtggggattgtatcgcatcattgggaaaacctgtacgaatctaacagaccgacaagcaggacgcggtgatgaaatcaaagcatggatcgacaccttcggatgtaagaattaccttatccttgatgacgataccgatatgctaccggaacagagtgaacatttcatcaataccgatgggttcgtagggctgacagaagaacaatccacttacgcgatccgtaatgtgttcggtgtaacaaacccgttctgtcctgaatgcaacggctatgggcgcgtgaaccaatatgataaatgtccgtcttgtgacggcaaaattttacttctctaaatagagaaaaactaaagaggttttgaaaatggctacagaaaaatggactacggtacacccgatcccgtggcgtaacaccagctttacctatctgccgtggtggatctttgatatcatcgtggctgcgaatgctgcaagcgaagactggcgtgattatgccgaagaaaaatacgcgaaagaattcgacacactgaaacaagcgtatattgattacaccgatgttgatttcatcgaatctcgtaacggttatctgtataagctgagtgattttactcctgctgatcctgtcgtaacaattacaccaaaaaccgctcctgctgatttcaaagtaggtgatgcggatctggctgcaactgatctgtttaccatcgatccttctggtacagaaatgactctgagtgttgactcttccggtcatggttctatcgttggtggtaaacttcatgcggttagtgaaggtgatgttgttgtaacagcaacctctggatctgttactgcaactctgacggtaaacgttaaacctgcaccataataacaactaagaaggtaaaaatgctactatttgaattcaatgatgtattcgcaaaattcagcgacgcaatcgaagccaaatttggcaaacgcccacaaaacatgacagatgcagaatatgaagctgctgtatcgtccctggttcgtacagatttctatgaaaaactggcgatcgaggtgttgggttgggatatgatgaaatggggcatgacctatcgcgatcgcgaagtcggttttattctcgtcaacgaagcaaaaagcccgtcctgggtgaatagtcaaaaaatcgcgtacatggataaagtatgcgcacagatgggtattgtacgtttagacttctggacttgtcgggatctgaacgaactgaaagcccacgcttaccgttgccctctgatctcccgcaatgataagcatcgtcaagcatgggatagcgcagggaaatatcgtagtgttttcctgaacgacgatatgaacatcactattcaggatgtgaaccgctcctttgcggattacacaccataaacaaaaaagggaaccgcaatggttccctttcttttatgcaatttttctgatttctttcaatgcttcttctttgctaccaacgaagagaatcgctttacctccggcttttctgaatggcaacacagcttttgccctgtcatcaatcagtatacctttgtccgcatatgctgctttctctccgctgcttttggtgtagtggaattcaggcagataaccgaacaccttcatcaacgcttttcttttttgttctgctaccgcatcggaattgtatttccctacgctggttaagatcgcaacctgacctaaagttctcaaatgacagaacaggtcgatgccctcttgtaatggttccagattttcgtagaagtcagtttgtgatatagcctgtttcgcttttttcaattcttcttccggcattctcgccgggtcaccgtacatcggaacaaaagaaccttcccagttgaacagtacaccatccatatcgaacaaaaactttttcatatcaattcctcggtttgtgtgtgcatcatattcatatatgttcctattgtcaaccccatgtatcagttttcggtgcgtatgctgcaactttcgccactaactctttatcaagctgatcaatggatttctgcggctttccttttgccttaactttgatgtagttagacttaacgacaaacataccgcctttgtcagatttcttgatttcgctgtcaatgcctactttgttgaagctgatccagatatcgccgtccatgtactgtttcagagagtcgcccatattcaggatcttcgccatagtgagcgctgccccttcgtgggtatccatgaggatttctttaggcactacacgatcgcgtttaaggttctgctgcatagcaatatgaacatcgttcataacccaaacgatatggatgttttctttctgataacccagcgcttcaacatcacgggcgatacttgccagcttgctcatgcttttcagggttacgtcaaagatcaggtttggtttacggtcttccggtgctgctgtgataccagcgtacacacgcgcctggtttttgttggatacgttgaacacgtctgcgatcacatgatgcagtgttgctacgttgtccgggtttttcaggttcattgttttgacatcgtgaccagttttcgctttgatctctgctgccagtttggtactacccatgaccaattttttgagtgcgtcaacgtccagggtgatcccttcgatacctaacagcttttcgagggtgaaccctttaccagaacccgcgccgccagccaggatgactacctgaccaaatttaggataagccttaccgccgaaggtgatcagcgcttcatcaaggctcgtaaagtctttgaatgatttcatcttagaactccaggtgtttatttaaaagtatttattgacacggtttatgagtgtgtttatagtgcaattgttcgacggataggccggaagaactttaaccataaggtaacaattatgaaaaatgaactgcatgaattcatcaacgccgctgctcttggcgaccagtcaaaatataaatcccgtcgcgataccctgattgacgatttctgtaatctcttggggttcaagcgctggcataccccgtctatgcgtccagattgtgatccaaaatgggattacttcaaatggagtgatcgcgatcgtggttacgtcgataacgtccgcgtaatgtctttcaaccacttatacgcaaattcaacaattgctgttgctaaacgcaacgattcgacttatccgaacgggtggagtgttgctaaagtcatagaaacacttcttcaactgcgtcgcgaatataaatcagcataccgtgtcaatcccaatcctatctataatgaatggcaaatcgtcgcgaaatacctgctgaacatcacctattctattttctgtcgcttcgggacaaaagagattggatttggctctcatgatataattgcagaagcacgtcaccgcatgatccatgcaatcctgaaaattcaaaactctggtgggcttgttcttgctgcgttctgtgatgaaattgtttactacggagaacaggtcgaagttgatgatgttcatcacgaaaaattcaaaagatttgtattcgggcaatataacagctattcatatggaaacgatattcgtgtgatgaggcacccgcgcattatgttggatatggaagggtgggaaccaggtcacggaattggtgatgccgaaagccaacgtgaacgccgtgttcgttcagttgctaaaactcgcgaattgatgacaggtagccttactgattacctgttcagaacaaaagaagacgttgaaaaagaatttgttgacttgtctggagaatagcgataagctgtaatctctgaaaacaaggagataaccatgaataccattaactgccgcaaagagttcgttgagttctatcacggatcatgtactgctgccggaatcgaaagcatgttgttgcctccttgtgattctgatactctgtctgaaaaaggcagaaagaaaaatctggatcgtgttttcttcactgctgatatcgggctggctcgtatctatgctggaagggctgcacgttcaataggtggtgatccggtactgtatcgggttgtgtgtccggtagatgtggtatgcatgaacgatgacaaaggcgcaagcgtttatcatgctgcatgggctttctgtgaggaattatgaaagataaggtgttagcgtatctcgttttcttgctgggatatcgcgttgaagtgatgggtggttattcttctttgtatggagatttaaccgcgatctggatggttgcgttgggggttatgtttacctttatggcgatctgtattgcgaatgaggctgatcaaaatgcttgaattttatcctgctggttgcaagtcaaatccgcctgatgcatcgttccaatcgtggatctatttccatcgtgaactaaacgacatcatcgaaagtcagtggaaagaccatcctgaacgaagtgcccccgatttagtcgatagcgtaacagatgtacgcaccctggaaaaagggctgtatgattgtctggttcagggaatggtgtgtaaattgattttgtggtatgctccgatcggttcagatctaactcgcaaaatcgcccgtggctatatcatgacgaaacgtgagtttgaccagatctggaacgaacccgactgtttcgaacgcgaaaaatatgaaaatgaggttagttgcatatgaaactatttcatgttgtgtatggtgggatgaaaaacatcgacatcgccgcgttatctgctggtatgctggacgaactcgaagcacagatcgggaaacgattcaaagccagtatcaccgaaacgcaaactttgtttgtcgatcaccctgcggatatggaaaaccttgtcaacactctggatgatctgatgatcccgtgtgctgatggttggaacgaagcatccggtgttaatgtagttgtaacttttgttcttaaaaatgttgacagcagaaatgccgaagtgttagagtttattcgtaaaattgattctactaaaggaaagtaactatgaaaatcgttcagcgtaatatcagcgaagttagccagcaggaaaaagtacagattcatttcaaattcaatgatctgaaactgggctatgcacagatcgcccgtgagcacatgctcgataacggcgacatttacgtgattgttcaggaaattgagcgaattcgtgctttccgcgcagaaaatccaaaagtgaaacatgctctgcgccgtgtgtacattaataaacatcgtgaagaacagcgtaagcctaagaccaaagctaaacgcgatccgcgtccagataacaaacgtaaagcaatcaacggcgctatggcgctggcattccaggaagcgggtttagcataagaggtttacatgaattcttcaatgatgaatcgctggtcgggcgtgataacttcgactatcaaaaaggatttggtgaaggttgaagcaaaaccaaagccagtagaaccggaatcactcgatcctgctgagttggaacaccgccgccgtgcaaagcaaattgaattcgatctgcgtgtcgctcgtttatacaacagtaaaaacgatgatgcgcgtaaccgcaaccttcaatttgctctgacgttaagcgactgggcgaagctaatgagtgaaccagtatgttcttactccggcagaccatttagcaacaaaggcggttgctctgactcccgaacaatggaacgaatcaacgcttctctgggatacacggttgaaaacacgatcgcagtaaccagcgccgcgaatagcgagaaatcaaatctcgatgcgtttatgaagggttctgtgatccttccagaagtaaaactgaaactgttacgcaaagctgcgtatcaaattgaaaaacaactgaaaatcaaaggttaaattatgtttgtgaaatattcttctctgactaaccattatgaaggtaaattcatcaatggtgtgatcatgaatggttttactggttgtgtgtgggttgcgcgtgaaaagatccacggggctaattttagcctgatcacttcggacggtatcaaagtcattccggcaaaacgtagcggtgaaattctccctgctgaacagttttacggttgtgaaccagtagttgcaaaatactctgaacctgttcgtaagctgtgggaaattctagcaaatacctgtgaatataaggaatatgctgatactggttctttggttgttcaggtatacggcgaatttgcggggcgtggtgttcagaaagatgttgactacggcgaaaaagatttctacgtatttgatatccgcgttaatggtcaattcctccctgataacgttgttgcaaattacgctgttgctgttggcctgaaaatggctccactgctggcatacggtacgtttgacgagatccgcgcattgcctatcacctttgattcggtggttaacctggcgaactccggtgcgatccctgcaaagaacggtgttgaacctgagttcaaaaacttcatgatgttgaaagatgatgaaggtgagaacatcgcagaaggtttcgtgatgaagcctgttcaacccgctttcatgccgaacggtgaacgtgttgcaatcaaatgcaaaacgacgaagttcaccgagaagaagaacaagcaagcgaaccgcttcaatgctccttctgaactgtcagaaacagacaaagtgaagctgaacgaattcacctgcttcctgactgaaaaccgtgtgaaaaacgtcctgtcaaaaattgacagcgcgaatatcaccgcgaaagatttcggtcgcgtgatggggctgacggtacaggatgcgctggaagaaatcgaacgtaactacggacctttcctggaacagttcgaaaatccaacgctggcgaagaaaaccttcactaacgaagcgtcaaatctggttcgtgagaactggggcgcaatcctgaacaatgaattttaaatctgttctcgaaaacgcaaaaacggctaccctgatcggtagccgtgaaccccctgaacgtatcgcgagtatagccataaagattggacgtgctttaagtgatcgggggatcttcgcttactctggtggtgctcctggaatggatagccatttcatgtttgactactcaccagaaagacggcgtataatcctccctgagaacggttttaacgggttgtattcgaatggtaaggatatcatcgactatacagaatacgacacgtacaaagccgctgacgaagcgagaaaggtagctggacacttcgacaaccaaaacgaatgggtacagcgccgatatgctcgcaattcaatgcaggtattaaccgaaaacctggacaaacctacagattttgttctattctgggcggtagagaaagatttttgtgttaaaggtggtactgcgatcgctgcaaggcttgccagattgtataaggttccaacgttcaatctttggaatcaaaacgttctggatgaagtctgcgatactttagggattaacactaaacctcctactctggattttctctggtgataactcccgaacaatcacgtaattacgaacgcctctcagttgaagaggcattaaaaaaggcgaaacataatggtagaaatcaatggaatcggtgtgaacgcacaggcgggaagcgggacacagtgggtcaaacgcgaaacgcaagatgatccccgctgtggacgtagcccgacactggcggaacgtgcgcgtaaacttgttgacgaaatcaacgcgaaaatggtcgaagcatcccgcaaagacatttccgagtatgtcctgaaatatccgactaaacaatcatatacctttgatatgaaacgttttatcggtaaggttatggatcaggaatgtaccgaaaaagcatatgcggatctgggtgaatggctggcggaagaagggtttactttcgatacacagcgcaaccgacaagctgcgttactcaataccttcgcgggttcgcgtcgtattaccaactttagcgatcctaagcgtgacggatatagcgatctgacttattacatcacctggtgaaaataattcgaaaaacttgttgacgggagttatgagtgtggtaatatagctcccgtagacaagacactaacctaaaaggaaaacatcatggaaatcaaattagtacctacttgcgctggctactgcttggcactgaatggtgtagcacacaacggtaaaggcttacgggctaacgttgaagcaatgctgaacgaactgggtgcggtttatgaatatgatgacgttgcaaccagcgttaaaatcataagccttgaaaaagatggtgttaactgtgcgggttggtgggattgctacatcgactatagcgacaaccgggtcttcttactgaccagcaactaaggatcgactatgtttggaatgaatgagtgttcagaagcggacgcgctagaagactgggctgactttgatgaccttgatctcgatgatgaagatggagaattcttctgtgttgggcgcggggttgaaagaacgaagcgtgaacttcgaagccgtttagcaatggggcttactgttggatctggaaagaaacagcaagttaaatattccgatggttctattcgaactgaaacggttgtcaaagaagtaaacgggcgtgtcattacgtccgagcggcagaaggacatcaaacaattgtacgatgttgcaaaagccgctaaagtaggaaccatgatcacttgtcctacgtgcaaacagttgcacaagaagacgacatatcataaggtgttctgctctaatggtaaaaaatccaggaaagactgtaagagtaaatactggaacacgatccatccagaacgtttggatcgtatcttttaaatcaaaacgtggagtacgtttaaatgaaaacttttaatgaactgaatagcctgatcacctcaactgattcctacaaagtgtcccactggttgcagtatccacaaggcactgatgcggcgatgttctatattgaatctcgcggtggtaagtttgatgaagtagtaaccgctggcgttaacttcgttgcgcgggttcttgccgaaccaattaccatgaaacaagttgagttggcacgggtactttaccgtaagcactttgggaaagagattttcaactacgaagggtggaagaagatcgcagaactgggttatgtccctgttactttccgtgcgatcccagaaggtacggttgttccggttaaaaatgccgttgcgactgtgtacgccgaacgtgaattctcatggttggctgggtggctggagacaatgacgattcgcggtatctggtatccgtcatctgtagcaacgctatcgcgtgagtgtaaaaaggttctggctcattaccttgatatgacttctgacctgactggtgaagcatataacatcacactgggtacacgtctgcatgatttcggggcgcgtggcgcgacctctgctgaatctgcgggtattggtgggctggcacacctctataacttcatcgggactgataccgttgaaggtatgattatggcaatcagtctgtttgcggactatcaaactctgtttgatgaagttgaaaacgtcgaagcaatcggtgtttcaattccggctcgcgaacattcgactacgatttcctacggtaaagagaacgaagacgaagcatataaaaacagcatcgaaatgttcggggatagtttctacgcttgtgtgtacgattcctgggactacaaaggcgctgtagatcgcattgctgaatataaagagcaaatcattgctgcgggtggtactctggttgttcgtcctgattccggtgatatgattgataacatcatgtacaccctgcgtaaactgggcgaaatcttcggatacaccgtaaacagcaaaggttacaaagttctgcataattcagttcgaatcatccagggcgacgagatccacgggcctgaaacaatcaaccgtgtgttaagttggatggaagcgaacaagtgggcgagtgagaacatcgcgttcggtatgggcggcggtttgctgcaagaagttacccgcgacactcaaaagtatgctgaaaaactgtgcgctatccgcgtgaatggtgtgtggaaaggcgtttacaaatgcccgaaaggttccgaatggaaacagagtaagaaaggtttgctgatgaccatcactaacggtgtggaattcaaaacaatcgacactctggaaactgagattcctgacgggtggcgtgatgcgatgattacgtattacgagaacggtgtattaaacacctccgatacagtaggggttatccgtgagcgagcaaggatttaatatccgcgccaacgataacggatcagtagtcttctacaacaatcagccccttgtcgctcgcaaggggcttttttgtaagttggtgggctacgggttcaagttggaacaggtggacaacgcgacactaaaagaggttgttcggattgcttatctgttgaaagataaaaaagatgaacaccgtgctattgcaatgcttgagaaattaggcgaaaatcattgcttcgtggtgaatcgtgggtataagtacgaaacgatcgccttatttgagaaaggacttggtgaattatgattaccacaatcaaagaaggggttgacctccatttaggcgactccgtaaagctgattaaacagcttgaatctggttctgttgacttgaccataacttcgcctccgtatgacaacttgcgccattataacggctctggtgatgtctggggtgaacacgtatggaaagagttgatatcggaactgtaccgcgttaccgctcccggtggtgtggttgtgtgggttgtgggtgacgcgactatcaacggtagtgaaacgggtacatctttccgtcaagccttgtacgcgatcgaacaaggttttcggttgcatgatacgatgatctatcacaaaaccgctctaccgaagaaccataaccgatacgaacaggactttgaatacatgttcgtgtggacaaaaggcgcaccaaaaacattcaacccgatccgcattccgtgtaagttccctgaaaaggaaaccgcacgacaaaacagctacttttccgaaaccaacgaaaagaaccgttcagcacgttccggtaagaaacgtaaacctgttggcaaggataaaattaagggtaatatctggtattacgctgtagggcgcaatcactcaacgaaggacgagattgcattcaaacacccagcaatatttcctgaacaactggcagaagatcacattaaaacgtggacggttgaaggggacttggttcttgatatattctctggttctggtacagtgatgaaaatgtcgatactaaccaacagacggttcaaaggcttcgaactgatggagaattattatcacgattctattcttcgtgttcagccatacgttaacaatctggaatcttttctatgagttatttgggtgttatcccctatacaggcaacaagcagtctctattacctgaactcttcaagttgttccccgaaagaagttcatacatgcgtttcattgattgtttttgcggtggccttagtgtgtcgttaaacgtccctaaacccgttctaagcaacgattacgataagacgcttattgatatgtatgagcgtcttaaaacgcttcctgacctgtctcctgtgcgagaattgattgcatcgaagggactggggaaagacaagaaagaagagtatctgaaattccgtgatgaatacaaccagaacaaagatccgttatggctctatgtcctgatcctgcattcattcagcaacgttaaccggacaaacgacaaaggcgacttcaacgctaatttcggatgccggacgctcaacgatgcaacagtaaaacgctttgaacatttcaaaaagaatgtgaaaggcattgagttttccagtggttcattccgtgacattgatatctgtgaaaatgatttcgtgtattgtgatccgccttacctgatcaccgatgcagtgtataacaagttctggaacgaagatcgcgaacgtgagttatatgctttcctggatgaactgcacagcgaaggaatcatgttcgggctgtccaatgtgactcaccacgccggaaaacaaaatgatatcctgattgaatggatgcagaaataccgcgttcataatctggataaaaagtatctgttaggccagcataccgactcttacgagcaaaacaaaacgcaagaagtctacgtgtgcaactaccagaaacgcgacgtaaatacattccctttaacactgaacgatttaatgtaggttaacatgtttaaaatttatggctatatcccttctgtgtataactgcgctccgtgcctgaactcaaagcgcttgctggacgcgaaaaaacatccgtatgagttcgtgtctgttgcggattccgtggaagacggtaaacctgtactgaacgaagcggtgatcgatgaactcgaagcgcttgttggtacgcgccggatgaccatgcctcagattttccatgacgggaaacacgtaggcgggttcgaccaacttcgtgagtacgtccgcaccctgtaataaataatgacaccttactgaatggtgttattatgctgacgaaacgaattaccaaaaaagactacccaactatcaagcaagctctctttaccgaacaagggggctgttgtgctatctgcaaacgtcccctggagggcgagatcgagaaacatcaccttgaccatgaccatgcgttagacggcgaaaacgccggacgtgtgcgcggcctactgtgtaacctatgcaacggtacagaaggtattgtgaagcacaaattcaacagatccggtctggtgtcccgtgatgtcgattacatccagtggttagagaacttgcttgcatatctgaaacaagactattccgaaaaccgtattcatgacaaattcataccagataaggtaaaatggttttcaagacttaccaaacctgatatgattgccgaaatggtttctatgggcttcgagtacgccgacaaagacgaacgcaaagccttaaccgcgaaatatagaaagcaattaatgaaggcaacgaaatgaaagtagaaaaacgcgacggtaaaaacgtcgatttcgataaagaaaaaatccgtattgctgtagaaaaagctggcggtactatgacggatgctgatgccgcaatcatgctggttcagtacaatcagatccgcgatggtagcgcaatgaagatcgcccgtatccaggaactcgttgaagaatccctgatgaaaacgaacccagcggtcgcccgtgcatacatcgaatatcgccacgatcgcgatattgcccgtgaacagaaaagtaagctgttcaaagatatctccggcatggtgaatctgtccaacaaagagatcaccaacgagaacgcgaacaaagacgcaagggtattcccgacacagcgcgatctgctggctggtatcgtagcgaaacacttcgcacgtaaccacattctgccaaaacacattgtagaagcgcatgattctggtgatatccattatcatgatctggattacagcccgttcacgccatacacaaactgctgtctggtggatttgaaaggtatgctggctaatggcttcaagatgggtaacgcagacatcgaacccccgaaatcaatcggtgttgcgactgctcttatggcacagatcaccgcacagattgcctctcaccagtacggcgggacaacctttgctaacgttgataaagtgctggctccatatgttcaaatgacatatgataagcactttaaagatgccaaaaagtatcaaatccctcgtgatgttcagtatgcaatagataaaactgaaaaggatgttttcgacgcgtttcagtcatatgaatacgaagtaaacaccctgcatactgcgaacggtcaaaccccgtttgttacaattacgttcggtactggtcaatcccgatgtgaacgcatgatccagaaagcgattctgaaaaaccgtattcgcggcctgggtaaagagggtatcactccggtattcccgaaactggttatgttcatggaaaaaggaatcaaccttgatccagaggatcgcaactatgacatcaaacaacttgccctggaatgtgcttctaaacgcatgtacccagatatcattagttcagctaacaaccgtgctattactggttctagcgttcctgtatctcctatgggttgtcgcagtttccttagcgtgtggcatgatgataacggtaatgaaattcttgatggacgtaataacctgggtgtggtgacaatcaacctcccgcgtattgctcttgaagcacaggaagcagacgacgcacacgaggctttttggcgtattcttgatgatcgtctgggtttgtgctttgaagccctgatgactcgaattgatagtctacgtggtgttaaagccagcgttgcgcctatcctgtacacagaaggtgcatttggtgtccgtctgaatcctgatgatgaaattctggaactgttcaaaaatgggcgtagttctatcagtctgggttatattggactgcacgaaacgctgttgatgtttggctcaggccagcatccattcgatcgtatcggctcccagaaattaggtcgattgatcattgaatatctccgcgctgcaaccgaagcatggaagaagaaaactggttttggattcagtctgtattcaaccccagcggaatcgctctgccatcgcttctgtaagctggactttgagaagttcggaagcgtcaaggggatcacggataaaggctggtacacaaacagtttccaccttgacgttgatcgcaaggtgacgccgttcgagaaaatcgactatgaagccgattatcattacatcgctactgctggtcatatcagttacgttgaatttcctgatatgaaaaacaatctgcaagccctggaaaaagtctgggattatgcgatggataaactggattacttcggaactaaccttccggtcgataagtgctttgtatgtggctctgatgacgagttcacgcctacagaagaaggtttccactgtaagcactgcggcaatcacgatccggctaaaatgagcgtcacgcgccgtacatgcggttatttgggtgctcctgctgtccgtggtttcaacgaaggtaagaacaaagaaatgatgcaccgaactaagcatcaaaattaatcaaaaagccccttgcgaaagtgaggggcttttgttatattgcacataccgaaactatgaggtattgaaaaatgatgtactggacaaaagattattttgaatttcgtgacgaagaaagttttgggacggtgtaccgcaatttagctttgcgtggtagtcctctgtcgcctaatcaactatcatctgtcgtgtttcctatcaaggtaacgcactgcgatcggaaaggtgttaatgggatcgttgatgccaatggcacaacatggtattccgaagattcttatctgtttgataacgaggatcgcggattctttaaaaagtttgtcgcgattaaacctgctgttgaaaaagccgacgcgcaacaactgctggattgttctcacctgctgggacgaatttacgtagatggtaagctggtgacgaaaccaggtgatctggaaaaattcttgcgtaaggcgcgggaaactaccctgaaagacaccgaaaaacgttatgatacggcaaccgccaatctacagcgtttgtctggtgaactgaaagttcttcggggtgaatgatgtttccattaaaggcgcgggtacgcaacaaaaccggaacacaagaatggatggagtgtttacgcgaaactaaacactactacatttcacaggctgtaggctatgacggaaagaacattcgttataacaaagtaggtggtaagcgtgtggggatggaacaatatctccaattagaaaccgtccgacctgtgaacgttcctttcgatctgaaactaccaaacggaaagccaacgatatgatcgggaaaatccttgatactctgtttccctcccgtgtacgcgcacgggtagaaagagaaaaccgactcgaagagatccgcttcaataagttccttgaggacaagaagaagcgcgaagacgagaaacacccaaacgcaaaaatggctgagggtgtatcgaaatgttctgtcgtcgaactggatcgcaaactggctgatgtcaaaatcaacctggagatcatcgaactgaacaagcaaaccgaaagtctgggtctgactgtaccggaagacgtgatcgccgctgtaggccacacctccgtaagcgtcgataccatcgtgacgaagattgatgtgttgctgggtggcaaaaatgccgcttctgtaacctccgctgacgttagcgcttacatcgactccctgaacgcgaaataagaggaaggggcgaaagccccttttttggtatgtacgattacactattgaacgtgatcgcggtgaagaatggttgatttctcgtgcgagaaacttctatgttaaacttcctaaaaactttcatactttaccgaatgatgatactgatcgcttattgaggattcttgtagatgggaatgttccacagcgcgtttttcaggaaatggttgatcatgcgtgttctgaatgggataaaaagtattgcgaagaactgacgcatgatagtatagtaaacagcaacctaaaagacgcttacgaacgaagaagtgtgtacgacatttacgaaaaagagaggaaagaaatgatgttcgaagacggcggtagtgcattcaaaccagcacgtaaaacgtatccagactggcgcaaacagtacgcagaacagttatggcacattgacattcccgaagcgctcatgaaagcgattagccctgctgttgactactattcaggctggaaagatgaatatgagttagaagtcggttcgtttaaggcgcacgtcatcaaagcgaccagaattcttgatttcgttgaagctgttgcgtcatgtgatatcgttgaagatattcgtattccttcaatcaacgtttctcggtatagttctccgggtaacattcgcggggatcgttatgcgaacctggcaagcactacggataagctgaacttccataaaatcaatgaaaaaggatttgatggttgtgttctgatttcaatggtagtcgccacaacacaaggcgaatacaagctgatcattgattgtgacaaagcggctcgtgcaattcccacagtcaaacaatgctttggtgaagatttcaaagtattgatgaaagcccgtgcgatggaaaagttcatccattcgtgcaaaaagaacgtgctggagaagtatgatccggcgctcacatacaccaaaattgataaagatctggtaggtgatttatgctgattaacaaagcgcagtgcaaagcgattaactttctgctgcacgaactgattgaaaacggtatcagatttgaattcgttgatccgattaacggtgatgatcgtcatctgctccgctgggtgtctggtagcaatccgctggattcagtctcccaggttgtagagtctgcgcataacaatatgccttgtcgtgttctgttgggtagcgttaacgcctcaacatggaatggatctgatgcttattatgtcggattcaaaaaagagttgacggaagacgaatgatgttataatatgcccctgtagacaacaaactataggggctaaatcatgaaaatcaaaaatactgctactgaaaatctttgcaacgaaatcgcggtgacttactggaaagaaggtcacgtaaaagcaatgaaggattttcaacagtggtgtgatacccagaagttagccaactgggaatacgccgtaatcgtggaacggatcaaagaactgatcattgagaagaaaggcactataaaatgattcaactgaaattagacacccaagcgctgaacaacctgttcccagaggcaaaaggctgatgaactttgaccgcatctataacatggatgtggttaacggtaaaggaatccgtgtagtgttgtttgtgactggatgcaatcataaatgcgaaggttgctacaacaaaatcacttggaatccccgcaacggtacaccatacaccgaagagactgaaaacgagttgattaaacttctttcaaatcctcatgtggacgggttgacgcttacaggcggcgatccgttttaccgcaccaatcatccagtattgttaaaactgcttgagcgcgtccgtgcgacgtttcctgataaagatgtgtgggtttggacgggttacgccctcgaagccttacagagcgatacagaacgttctaagctgttaccattcattgatgttctgatcgatggacgatacgaaaaggatcgaccgactaagaaaccgtttcgcggttcggataatcagcgaatgattgagttcaaaaagaattccatcgaaattaaaaatatcgcttgacctggttggtagttctgttaagatatccacgtagcataaatttaacccaattgagagataatatcatgatcctgaatttcaaaacccgtaaagaagcccgtgactattgctggaagtggtcgatcccactgaaaaatatcaccaaaggaagcggttcacatccgtggacggtgagaacaaaagaaacccgcttcgaaactggtaaagattacaagctggttgatgtcgaaggtttcaccgacaatggcaaaaacattgctaacagtgttcagtcaaaacagatccaccaattgatgaacggtgttgtacacatcacaagccgcaatggtgatcgctataccttcgatgctccggcaggtgtcgctatgaacacccttcgtgcatgggaagcgaaatacttcacagaagttgctccggctaaagccccagcgccaaaacgcgctaaaaagccaaaaccagtaggcaaaccgtccgttgctcctgtaccagctaaaccagatctggattccgaacttgacggcggcgttaaccttgctccgacaaccgaaccagttgcaaaacctgctgcaccacagccagcaacggttgaagcgatgcctggtaactttgttgtaaaccgtccgtatgttctggtagatgaagctggtttcctgcgctcgcacactgcaaacaaacgcattgtacaacacatcaaaaacaacaacggcgttctggtgtttgttactgttgacggcgacggtgacgcaactatatcacaagaacgtagcctcccgtttgtaatgcatcgtgagcgtaagttcttccgtgaactcggtactggcgcagttcaggcagataccccagcggttcagaccgttgatattgccaaacagcaacgcgacaaagagatcatcgaagctgcacaggcagtagaagacgcactggcagaacaccagaaagcgatcgaagttgtcacacagaaagctcgcgcagttcgcgaagccgctgcaaaacttgcactactggcacgtaagtaatataattcgggggtgcttacgggcatccccttttttatttgaggtaatcatggaattattcgctggaaaaacttacggtttaaccgtatcccctgaaatctttgcagagaaaacctggaaaacaggtatcgcaaacatcattcgtgaaaaaggttacgtgacgattgatcgcacctcgatcggtgagttcgaagaccgcgcgtttatcatggacggtggttacgaatatgaactccctgcatcactatggaaatggttcaaggaagtaacgccggaagagggtgaattcaccccagaagaacccgaagaggttaatctgggtaaaggtgtagaggctgaaaacgttatgcgtattgcaacgcccgaagaggtttccgctggtgttacgggttcggatctgtgtctgatggatatccctaaattcacgtatcgccctgtaaaggaaaatcctctgcgtgatctccgtatcgatccatcattcggggctaacctggaaacgttgagcatcgcaccgatgccagtacgtaaatccgatgcaatgcttcgtttcgccttgcaacatgttttcggtggtggtagcatctatcaaatcaacatggaatctgaactgaaaatgcaggaagaccagattgcaaacctgttcgatctgcacactcagttaaccgctgttgagaatatcgaaaaactgttaggcaaagagaaaaagcgtattttgcaggatctcaaaccatacggaaagaagaatgaaagtcgaaatctacggcattcccgaaagtcttcataactgttacgggtgcatacaagcacaaaagctgttgacagaaaaagggatagaatatacattttatcccgttctgaaagaagcgaaaaacgatctgggctttgaatacgatcgcccacgtatcgaagagttagcaaaacgggtaaggcaacgtagtttagcgtttcaatacccgcgtatttttgtcgataacaaacttatcggcggttatctgcaactgaaacaacttattggtgattaaatgagccgtgaaattttactccctgctgcaaatgctgttcatgctgaaacgatggaatacatggagaaattcgttgaacgcgataacaccgcgatcatcactcctactcacctggacgcgctcgaagatcgtcttcataagcagattaaagatcaattccctgaaaaggttagccgcaacttcattcgtcaggaaatcgttgcaatgatgctgaaacattacggcgttgaaatcttcggtgtcgaaccactgaaaccgaagaaagcacgtcaaatgcctaaacagatcaccgacgaagcaatcaagaaataccagaagaaatacgctaagaataaatgatctttaatacgattgaatgtgttccgtcaagcggtaaaacaaaggcgattctgaaccatatcaatcaaacgggcgaaaaagcaatcatcgcttcgatttccatgatgttatcaaaacagtcttatgactattacatcaaccaggtaaaaggaaaacgggcggtgattgtggacacggatcaccgaaccaaaagaaccaataacgatgcgctgcgtgaagtagtcaatgattacgatgtgattttcatcactcatgcagcactgaaaaacattgatgactttgatttgtataaggatttttccctgtatattgacgaagttcctgatttggttgcgttcgaaagtctgcgatttaatagcaatatcaagcacatacgcgagatttgcttgccgtttagttgcaatgccgatgatatcgttgatttaaaacttgacgaagaaaaacgagaactggttacacgattagcctatgatggtcttcgtaaacgtgatgatatcgcaatgaagatgttcccgctttaccgtgctctgttaggggctattccggtgaagatgcaatgtagcgattcgggatatgtctgttacttcgtagaggatcatgacgtaagccagtggaagttcaaaaatgtaaccattgcttcatccaacatcaaagacacaattacagggaagatcctgcaaacgtttcatgatgtggagttcaaagattcaccgcttcaaaagctggttgactttaagcaatacaaaaacactgggcgcatacatatacatgtgctcgcagagggggattattcgcgttatacgggcgatctctctcaatctgggacgacagtatacacccagattaaaaaacgcgtggaggcgcttttagggggcgaacagttcatctattgcaccaacacatacagatcgaagtttagcgaggggcaggaaatcccgtacaactcgcacgggttgaacttctattcgagctatactaacgtggtagcattattcagttacaacccgttaccctggctgcgtcaaatgctccgagcggttgcggtgtcctctggacttgaagaggaagaattagttgatgcttatgttgtcagtaaatattacgaaccagcctttcagttatgcgctcgttctgatatccgacacaacaacagcaaaagaaagattaatttatttgtgcctgatatgcggttagcgaaatacatgaaggaaaaatattttcccgatgccattatcgaaaccacagaagcagttcaaacgaaaaggcaacgcaaatcatttcaaacccttttccaaatgacggacaaagagaaaaacgcttttacgccatacaagaaaagaaacaaattagattatgcgaatcctcttcatcacgcgattgttaaagattggctgaacaattaccgtgagaaaaaggcgacttgatggtcgccttttttgtttataaatatcagtattgaataagataaaggaaaacgataatggtagctaaatcattccgcgccacaagtggccttgatgctgctggcgaaaaagttatcaacgttggtaaagcatcacgctctgtgttgagcgacggcgtgaacgttgacttttttaacgaatttaacacgatccaacaatacgattctacccgtggttatgctgcgtttatggctatcatgtacgcgcgtcgtatttggtacgctcgcgcagatattccatcaccagcgggtgctttcgatgaaacaaaatggatctcaacccgtaacgatccaaaatgggtatataacaacgtaacgagcaatgacggtctccctgttgaatccggtacgtacttaatggctgacggtcgtttctctgaactgacctatattctgccagatgcccctgttgagggtgatattatcactattaaagatggtggtggtcttgcaggggtcaacaacctgttagtgcgttcaaacactcgtcagatccgtttacgtgatattcagtcaagctcttatcgactgactcacccatatatgaccgttgcgtttatttttaacggcaacttatggcgtgttgctgaaatgcgcgataaccgcgattcgcagtttgtgaacgcaacaggtgcgggttctttccaactgcaagcgggtatggtaacattccgtaatagcggtacaggcaagattactctgcaattgcctagatacgcaaacgatggtgactcaatcacaacttacgatctggatcgccttgcttcggtgaacgttgcgactctgcaagtttatcctggtagcggacacacgatcagctatgacggtatcaacaacgtaacttctgtgacttcacagcgttccggttatggtatcttcatgttcgatcaggctaatagccgctgggtcgtttatgatggtgatcagcgcgttcgtctgcgtcgtatcagtgatgacctgaacatgttgccgaacgattacgtgtttatcaccccgatcgctggtagtcctccaactgtgcgtaacgtaacgctgactcttccgcaagatgttgccgaaggtgatcgcgtgtatatcagtatgtatatgatggggaaaacgcagaactgcacaatcaaagttaaagatgattccggtgaaaagatccgcaccaacaaaaacatgatgcagttcccacagcgtaaggattatccacctgatgactggttcagtgttgacactctgactttcaacgccgatactgactatcttccatatatagaattgtcgtatctgaaagctacgaaagaatgggtagttgcacaatatcgcccgatcattgaacgtgttgatccaacaaaccgttctcgtctgggtgtgatcgcgctggctacacaggcagaagtaaacaaaaactgggaagatttgccttctgatgaactggcagtaaccccgcgtacactggcgaataaaactgctacggaaacacgccgtggtatcgctcgcctggcaacaactgcggaagttaaccagaacactacggctacttttttggatgacgtaattgttacgcctaaaaagtttaacgaacgtacagcaacagaagatcgccgtggtgttctggaaattgcaactcagacagaaacaaacgctggtactgatgacactaccgcaatcacgcctaagaagctcgacacgcgccgcgcgaccgaaaccctagcaggtatcgggaaactcgttacaacgggcgctacgacagcggagggggctttacgtggggatgctggtactaacgtctacaacttcaataacggtgttgacttactgactccgaaatcattgaacgagaagacggcgaccgaaaagtcaaaaggtctggttgttctggcgaccgaaaacgaagtggtaactggtgctgctggatctgcttcaatgccgatcgtagtaactcctgaaatgctccatcgtaaaacgtctactgaatcgcgtatcggtttgattgagatcgcaactcaggacgaaacgaacacaggaaccgatgatctccgtgcggtgacgcctaagaagctgaacgatcgcaaggctactgaatcgcttgatggtattattgccctcgctaccactgcggaagttgcagcaggtacggcaacgaataaggcagttgttccggttaagctgaaagagttcttcaacgttacgagtcatgttgcggttgcaaccactgatggtttaactcagtccggtactatctggacaacggttaacctggggattgcgtctgctactgaaacacagcgtggtactctgcgcgtagcgactcagggcgaaactgatgcaggtactctggataacgtggtcatcacgcctaagaaactgcaagcgaagaaagcgacggataccgccgaaggtatcattcgttgtgcaaccaacagcgaagctgctgcgggtactgctactaacctggcaattactccggctaccatgcagttcttgaacggtactgatccggcatggggtgctacaacattgcgccgtggtgcggtgtttatcactaccaaatcgaacacgttcatcggtgataatgtggttggttctactcagcctgtagatagttatctggaagatttctacgctgtatcgcctcgcggtctgaactttgctctgcaaaacttcttaccgttgaacgcaacagcacagaatagcctgaaactgggtggtgtggtagctgcaagctggatgcgtcgtgatgcagatcaaaccgtaacgggcaacaacacgttcaacggtacaagcaacttcgttggtaacgtaaccactaacgggactctgacggctaacgctgcggtaactgttaacaacaccgtaaccacgaacaataacattaaccagtctgcgaaagcaaacacggtttatgctaatactgttttgagtacagcaaccgctggaactaaaaacttgcttcgtactttccgtggtggtgtgacggatactacatggcatgaaactgttcagggaactacgtatcgcttggcaactggcacaaccgacacgaccgacgttctgactgttggtgatgtatctaacggtacaatggcgtactccggtactactctgcgcctgaatggtaaagcactggctaacacgaacgcaacaggtgatgtgactattgcaagtgatgcaagtcctacggtacaattacgaaccgatgcaactaacggttggaacggcgtaacaatcagtaatgataacggcgtgactactgcaaccgtaatcaacaccagaaactttacccagcatcttgacagtacctatgtcaatacagcgggtgatactatgactggtgcgctgtcagttagcgtaaacggcacgggtggacgctttaccagtgtgagcggtacggcacatgttcaggcgggtgatttctctggtaacgtccagaagatgcgcttaactggcattgacgataaggtattgactgaattcaatatcaatatcaccgattacaacaaagcgatgatcaacggaaacctgatctatcatgcaggtcgtaaaccaactccggcagaaatcggggcggtagcggtagcgggttcaaccgtcgatactctggttgtgcgtgactatatcaaaatcggtaacgtgaaaatcttcgcaaatccaacaactaagacttgtgaatttgtgtgggaggaataatttaaatggcgaataacgaatttatggcgttattcggccctgatagtttcacggcgaatgtgttttcagaagcaaacgccgtgaaatatcgccttgttgtccgtggaacgaataacgattctgcggtcaactcggttgaggtatctattaacggggctgatattataaacagacgaacacaagttgcttgcggaattaacctggctgtcattgatggaacaactttagcattattggattacaaagcattcgatatgtatggtgatcctgctacgaacgggaatgcgattaaagactacctgaattcacttccagcgaacagaattgtgtgtttttatactttcgatgctatcaaaagtgatgacaactttttagcaacaatgaggaaaattggttctgttgcatggcctgaaacacgattctttagtattccgacgacaacaaacagcaattcccaacgttcatcttattcagctatctattcatctacgatgaaaaagatctgtatggaaaactttgtgggtggttctggtacggggttgaaagacaatacaacgagttttgttgaagttgtgtttgatgaatttagtgatatcggggtaactggtattcctgaaagaatggttgatgatgtccagacataccagaacagcggggatatgtacggcttccatttatacggattgtggtcaatcggtaatgatgtttatctgggtgacaccttcaaatttactggggatctgtattgttcaaaagaacttcgtgatgctgggggagaagttcacctgtatatgtggacagaaaacggtagcggacaatggatcaaatcaaccattctcagaacaaccggattagcccctgatacatggcattcgttaacaggatatttcactattcctactgatgcggtaaatgctcgaatgggttcacaggtgtatcattatccgtcaactgtaaaagtcgggcttgctcagtgtcgaaatgtccaaattgctaaagtaccgcgcgaagaagtagatcgtaacggtgctgcgatcggtgtgaacggtatacgaatgcaaacactttccgaagtgactgcaacaggaacagaaaacccgattgaacaattgctttctctgcctgtttcgcctactggggttatcagtgacaagaagatcagttcgcataactttgctgaacttgattatattgtttctgatccggttgaatatacttcgacaagcacagcggaataccagttcaaagaatggactgctacccagcaagcggcggtaacgaaagcgtcactaagcagttacggattaaaagctggtgatacgatccgtatgcaatgccaaatgaaacgcgatgcgaatgcgattgctaacagtaaatcagcatatatcgtaatgcagttctgggacgctgataacaaatatattaaaggggtcggtatggttgattccggtacggttccaaacatatattcgttctataaagcagaaggggttgttcctgctggtgcggttacgtttgatttcggtttatatcgttatccaaacaacacaaacatcggtacggtatccgctaaagacgttaaactgtcaatcgtgagataaaggggcgaaagcccctttttcataaatacagtcattacaggagaaatttttatggctgatttgaaattaggtacaacgctgggtggtgcgggtatctggagtgcgtcaaacctccctctgctgccctctggcgatagattgctgtttaaagggtggagagtatacactgagaacgatcgcccgacagcggaggatataaacgccctctcaacgatcaacggcggtgttgttgcgaagaatactacattcaatcagaatttggttgttggtgcttcattaactgctaacttgattcagtcgaatagtgttcttaccatccaacgtagcgcaaaccctgcggaaatgattttctatcgtcccgatattacggcaaccccatcatcggaagcatgggttttaaacatgtatgcgaaagatggtttaaatcgaaacatgggttcgttgattattgctgcccgtactgacggcggaaataaagtatatctacgggcaaataaagacggttcccctaatacaagtttaacgttggattcacaaacccagcagataacagttgagcaaggatctttccgcgtaattggtactacgaatctgggtgtgacgaacgctgcatcaatggcggttagcggtgcgattactgcgaatacagtaaccccgacaaactgggctaaccatgatgaacgatatatgacgggcattcctcgcggtatgtctggaacaagtttcggtgctgctgttgtaactgaaaagaacgatgttctgtcagtaggcggtaacatcaccgatggcccatatggtaacactacgtattacggacaggttgttaactatcgtcgtacactgaatagtggggtttcattagttcaaacatacttcgggaacgaaatgtggtttcgtcttggaacaggttctccgggcgcgtggtcgtggaaccagggcgatgctaatggttggcggcgtgtttatgatacggtcagtccaccaactccggcagaagtgggggcagtaaacaaagctggtgatacaatgactggtggtttagcgttacttggggatttgaccttccaaaatttggtaaatcgtcatattcgtttcgaatacaccaaaaacgacggttctaccgctgttgacgcttatatctataaagatggtgtagatagccctactcgtcgtgctggacttcgcattaactgtgccacaccgaacaaagcgagcgggaatacttcaaactcaggtgattttatattcggggagaatggtaactttacactacctggtggcggtatgattgttcaggacggattgaaccagggtgtttattgtatgagtgcattaagcacaaccgcaagtggatctaagaactacttacgtaaattccgtggtggtaatagcgacacgatctggcatgaaactgttcagggcggtacgttgcgttgggctactggcaacactgatgcacaggaatgtatgcgccttgatggaacaagtttagtagttcaaggaaacatcacgtcaggaaacaatttcttggctggtggtatcatgcaaacgaacggcggttctttgtatatccgaagctctggcggtactcatacgtggtatcaagaaccagacggttctgaacgtgctgttacatggtctgatagttctggtatctatcgaatccgttcaaacaatagcaaggctgctacatgggaatttaagaatggtatgatctattattctaccccagtaaacggaagtgaccacggtttgattcgaggtgttgttgatgctggcggttgggatcaatggactgctcgatctgctggtattctgctggatgtgccaaatatccataccagtgcttataatatctggaaagtgacgaagtggggaacctctcatgttgctgcgatggatattcaccgtcctagcgatagtgattcacagacgcgagttcgtattattacaaactccggtgcgtacttctactttaacggttctggtgaatttactgcatctggtaacggtagctttaacgatgtttatattcgttctgatgaaaaactgaaaagtaatttcaataagattgaaaatgcattagataaagttgaactgttgaatggtatgatctacgataaagcggatcatatcggtggtgaacctacttcccgtgaagctggtttgattgcgcaacaattacaatcagtattaccggaagctgttaaaactggcgaagatacagaaggaaatgaaatcttaactgtttctccgaccgctgcgatcgctttgttggttaacgcgattaaagaactccgtgaggaagtcagggaacttaaatcccgctaattaaaagcccttcggggctttttctttttataaatatcataaaagcatttgaggatctaataatggcagatttaaaagcgggtactaccgttggcggtaatactatctggagtcaggcgaacttgcctttgctcccttctggaaacacaatcacatataaaggctttaaaatctacaccgaaaacgataagccaacaaaggccgaaatcggattaggcaacgtaacgaacgatgcacaggtgaagaaagctggtgatacaatgcaaggaactttggaattacaaggttctgcaactgaattgaaattaccattcaggatcgcaatggttagggcaacagaaccgtatctcgttgcaactcgcacagacaataacccagtaacaaacgggtttcctagcgcagaaacacgcacatttgttatacattcaaaaaccacgtcaccaacgtcagatccaaacttgggggcaaaccttgttgatctgatttgtacccaacgccctgcgggtggtggtgcttattatatccgtgcttttggcgcaccaaacacgacaactggtgctgctggggctgtccgtgctgaattacaaatgttgggtgataatggtcttgttagtttaacggggacacaattcaacatcgggatgcaaaccgttgtcagtggcacgatctttggtgcgcaaatggctatcaaaggcgacggaaacaaaaacctgttcttccaggatgctggcggtaatgagcttagtttgatctatgctgatacaggaaagaacttatatgttcgtactggtggtggtgcatatgcaaccagatttgcatctgatggaactttagttctcgctaaccatctaaccgttcctggacaggctacgtttaacggtatgggtatattcaataaccgtgcttccgttgaaactgattatgctactcaaggagcaaacactgcaatacttcgagtaactacaaacggtgatggaaacggggttggtgatggtgttacccacttaggctataaagacagcaacggacgatataaccattatttccgtggtactggtgtaacgtatattaacaccaaattaggttttaacgtaaacgttccatcatattataatgatgttccccagggtacgccagcgcaatatttcttgcctactgttggacagggcgggaaaaactatttgcgtcagttccgaggcggtaacgcggacacaatctggcatgaaactgttcagggtggtgtgtggagactggcaacaggttctacagacggacaggaagaattgcagatttctactgcgggttatgctcgattccgtaacgaagttcaaagcgctacgtctggttctggtggacagttccgcgcggtacaaggaaactacggggtaatacaccgaaatgatggtggtaactactataccttgatcaccaactccggcgatccttatggaacatggaacagtttacgcccgattactatcagcttgactactggtattgtttctataggaaacggcgcgaacattaacggttctgttaactttggcaacgcggtaaacttcaacggaacggtcgaaacaaacggtattggttgtggtacgccaaacggattgggtacgactggtatttctctgggtgataacgatacaggtttcaaacaggaaggtgacggtattctcaacgcctatgcaaatagccagcgtattatgcgatggactactggtgcaactgctaactataaacagttacaggttcagggtgttaacgggccagcattacttctgaataacacagcgactaaccaatcgtgttatttgctgattactttggcaggtaacaacggcgcatacttcgggtttggtggtgctgatgataacgtatcggtacacaactaccgactgaatacgaccttacagttgcgtacttcggatctgtatatgaaccgtggtctgtatgttgaaggtaacgtaaacgccaacgatgtgtatattcgttccgatattcgactgaaatctaatttggttgaattgaaagattcattaagcaagattgaacagcttaaaggttatatctacgataagcaatcaaaagatgctgatgatatcgtataccatcgcgaatccggtctgatcgctcaggacgttgagaaggtattgccggaagcagtgcgcgaagacatcgacactggtatgttaaccatttcaccttcgggaattaacgcgcttctggttaacgcaatcaacgaactgcgtgaacgtctggaagcaatcgaaaacaaattaggggcttaattgcccctctttcatgaggtatttttatggctattgtaggagttcctggctggatcggttcgtctgcggtcacagaaacagggcaacggtggatgtctgctgcgggtaacgcggttcgaatcggaacaccgttttatatgtctcgaatggcgggacaatccgtatataacatcaactttacggtgtatgagcgttactataacaacgcccgttatcgtggtcagtggggggttggttggtattcaccatattcgaaaccttccggtcacggcgcagttggtggtagttttaacggcaacgcattcggtacttgtgtttctgcacaattcagcaatgagattagcgtaattaccattcaaaacggtcctgctgttaacctaagacttacgatggatgacggcggtgtgtttgactttgacaataacggtcgtatacaggatggatatcgccaatatcagattgcttctgcccaacataacgcgtggtatgactatttgaacgcccgtgtaggccaaacacgatccggtctggtcactcaacgttaagtaaattcctaaatatgttcggggtcggcatccccgaacttgaggattaaatatggcgctattacaagataaattggcggtgcttgaacgggtaatatcgttcatcatggcggtcaaaacatggaaacagttattcattaaattggttcttatcgtcactattttcattatgttcgtaacatggtataagtgggatgacttattttcagtctggaaaacatcttcaagcgttatagacgtgccgacgatggagattgaaaaggcaaaaaagtttgaatccgcatccatcgaacagttaaacatagtgcatttaactacgggtgcggatttttcggcaatctttgggttcagacctaagaatgtcaattattttgttgatataattgcgtatgaagggaagttaccgcaacagattaacccgaaaaatctgggtggctatcctatagacaagacatcggaagagtataatagacatataaacgggctgtactatatctcagatattgcaagcccgtatcttccaacaaaagaccttgttccggtagcatatacctttagttgtccttatttcaatctcgaaaactactattctggatcgattctaatggaatggtatatacagaagcccgaagtcaccgatacgaagttaatgatcgtgtgcaatcaggccgcaagaattttaggcaggattcgatgataatttcagtttcatactactcaaagcccgattgatgaaatcttttactttcgtcatcgggcttttatcgtatatgtcccatacgcgcataagttcatatggtgtaggtacatattcatcgttccagtatccaatgttccctatcgtaatgcgccggaaaccagcctctacgctgtgatatacaaagaacccagccttacccacaggggcgactttaaaaccgcgtgtagcggctttcatggcttcgtcgtgtgtcatgatagaatcacttcgcctctgtattgattgtggtagatgtatggacgaacacccagcgggtgattatctatgactaagatcaggtcaagttcgtcgtggttatcatcttctgcaactatatcccagtcggtcgctttctgttcttcaacactggcaatgaatacctggttaatctcaaccttacggtgagaacggcgaatgatcgtatccccttcgcggaacacgatcatatctgggttaatcgggcggtacgcggttttacccgcgcacacttcattaagcatttcttcgtatgtcattataatacctttactcgctgaacgatggtttgtttaacttctttgtattcgttgtgaagtttaggtgtcgctttgaaacgaatcacatcaccctcttcaacaattttgtttccgtagtagataaccacgttaccatctacgttgattttggtcatgaaacgttccacttcggtgtaataagaaacttgggtatatccgagagaaatcactttctcaacaaccccgctcatttccatacgcttaccgatttccccgatgtgctgcgctgctgcgatcttcgcctgtcgctctgcttcccattctgcgcggatttcttcacgtttagcgatgtaatccttctccagcgctacacccatgcagtaagagcaaatagcctgaaatactgggctatcgttgtcgttttctttgcactgatcagcccaccacagaatcgtatacatcggcatatcagcaatcacttcacctttacgcttaccgattggcatgatgccttgttccagcagttccagattttcggtatcttgtacagacagtttgccgcgacgttcgaacagatcgaaatctgcgaagccctggaacaccatctggaaagtatcggtctggttcagacgatccaccatgcgatcgaagtattcacgcgctttcgcttccgctttatctgggtcagtagacaggttgcagatatagttatcagaagtgaatccacctccacgacgctctacacgcagagtgtacatagcgtttttagcgccagaagaaatgaagtatgtcgcggtaactttagtcaggttagtcatggtgaatctccttagtggtttcgtttcgacaaggccaatatagcaaaagccctcaaccgaagtcaagggcttttttatcatgcgttcgaatctttcataactttatgaagatggatatcaaaaattttccagtatgcttttccgcgaggataaatttttgctttatcaatgtcttcgttgcttccccatgtattgtttgggttacgacaacgattttttgcataatccatgtgccagaataagcgttgcaccgatgaatctgtgcctaatggatcttctttgctgaacagaatttgtgaactcataagaagaaacctgttcgaactactaaatcaatctgtttttccggtatcagtggcgctttatcgtcaacgttgcactgataatacatcccgacatactcatgaggaacgttggattcgctcgcccatttcaggttgtcgtctgtacgcggccctaacatgaggttaacgatattgacagcgtgatcctgttctggggtgttgttgcatccgttcacataatgcccgtgagcggttttgaggatttcaatgatatcttcgtcggcttcaacgagatacagccccgtgttttctgggatttcctcaagaataatcaaagcggttttcatcacacttacctttatgtttctgcttacgttttgcttctttaagtgctcgcttgcgatcgcggtgagtagaagcgcggttgaaatcatgttttgctaccagattgttcatttaaagcccctcaaaaagaaatatttaaggggctttcgcccctcgaattaatccagcagtttgcggatcttatccgcgatacgtccggcgcgggttgcgcttgcggtgtgatcgctttctttggtagccagttcagccagcttacgctgatgttcttcttccgctgctttgcggtctgctgctacctgttcgacctgcttctgatcatgcgcaatacgcgcttcgagttcggtcagggttttgtcaaaagttgctacgatttcgtctacagaacggattttggaaaacagtttcatattcattatctcaattagtatggttggaattcaaagtcaaacagatcatttagtgcgcggttgtattcagtatagttctcaccatccccgaaccgcatctgaatcgcgctttccgctattgtaccagtaagattcgagaaaccaaagaggtttttaatcttatcgtgtgcaacgaagtacagagaagcactatccagcaaggccaccatcgctgatggttcatgttcgcggcgtttgatgcgtaacagagtacggtttgcgccagtcttacggcgttgatttggggctacgtagaatcgaaatactaccttacccgttttatcatcaactaccaggtagaagccgtgttctttcaggtcaaccccttcgaacttggtgaagtcaccgcgcttcatgtcacctatcttaacagcatatttgtggatgtcaagccttgtcagaattcttttcatttttcttcaccagtttatttcctaatttggtgtttacaccagttttcatattcattgtcagtaccagcaagaagatagggcatgacaaaatcaagatcgttgcgccgaacactaagcgaactaagcgaatcaacaacgtcccgatccatttcatcggtatctctacccacttctgaaccgttgcgagtaccagcataacataacccagattaaatgcaagggctgttgcgataataccgtaaggttttttgaagtatgtctgttctccgtcttctgtacgtccagcggtaacgttgcctccgttccagatttctttagcggttttgatggctgtttctgccccgctcaagttctgccagtagtcaggaatgctctgtaggaatttcataatcgaatcctccgcgcctgaatcgctccaggcgctgttttggggttagtagtgactgaatcccacagttacatcacgcatcacttgataacggcatacacgcatcttagcgttatcgtaatctgtcgggattgctacaacatcgcgaggattaaccttaacctgaatgactcgcccacgtcctccgccatagtgaggcaggtacgattttgcggcaacatgcaaaccgcatgaacaggttcggtttttattctcgtctacctggttacgtggcatttcaaccacaacaccaggggaattatcgaacttaccggaagccagatcgcggaagtcttcacgaacacgtttccacgcgtagaaatctccatcatctgccagttcgatatcgttatgcaccatgaacccgtaaagctgatacacagcatcgcgtgaagggttttccatcaacttctcgaagaagttcaccaggtgctcgtaagggcgatcgttgtacatttcgcgaacgatacgttgtgtgataccgctgtcaaacacgatatctttgtacaggactttatgcccgatgattttaatgttgcctttgctgtaaatcttcaacgcttgcgttgtgtccaacagtgtagcaactccctcgatgtcgcccttaaccattaaagcatgtgctttttcgaagttagggtgtgacgaatccgctgtgatgatcttgccgtccagtaccagagtaatgaacgattcagaaccaatcattttagatttgacatctgtttgtggaagtggtttcgacgcttccgtattatacttagaatgctgttcggtaataacgcgcccgatggttcggacgcttacaccaaattgtttagccagtgcggttttgtttgcgctggtcagaaagccctcataaactgctttcttttgtacatcatcaaggatcttaacgtttctcattatttccaccgtataagtttgaccaaatccatcacaattttatcatcattaaacatactgcggaatgtagaataagatgaatgtaacaacatgtaatgaattgatgggttgcgttctgcaaataaatcgtaagcagtatcaacgcgttctttcatatctttccgcattttgtaatacttcgttgacatttcacgaagtaacaggttacgcaccacagtttttgatttgtttttgccctcgataacatcataggtaaacttaccatcaagataatcgagcaacagatacaattctggattatagcggtttttaaccatgcgatcaagggttacgcccatagaatcgcgcagggttcggatctcgcttccgtggtttgatgaaatccatgcagggaaccagttaggttttatcttcttcgctgcgtccgcaaaacgttttaccagataatcatcaaggcatttcatgttgctatctggaatgcgactccacagagagtttcgcagaaccatcacttcgttcagccctgtaaccgttaacatggtcatcatactgctggcgatgctacccaacgaatagttctgtgcttctccgtccagtcggctatattcatcaacaccataaaggcgcatagcgtacatttcatccagtttcacaaactgtgctttagtcaggtacagatcgtttttctgtaagttgccctgatcatccaggaagtaatgatatgctgtaggcgtttttggacgcggttctgaatcaccagaagatgattcacgcgttgctttccagcgcttacgatcttcggtatacgtttcgaattctttggtcatttcactggttttcagtgtaacgatctcagattcatcgaaatacccagttctgatcaagtcctgaacaggttcactattaatctctttggttacgaaactgatacgatccgaaccattcaacatgcagtagccgatcagatatgggcggagtgaacgcgcttcattatcgttttcaacgatgaacagtttcttctgtcgccacggttgaatcatgcgcataacgtcctggcgtttggtagtttccgctttgtatgtctcataacggcgaccagaacccacacgttcgaatacgcaatctttcccgtcatatgggttagcccagaaaccccagatatattttccggttgcagtctcagagcttttaagatgcgtcaggatttcagccagcgaatctttacccacacggaaacgcttatcgcggcttacaaaagcctgtaacatgctaggcagattgttgaaccatatgattttatcacgggttgttttctgcttgccgaactccgcaactaactcttcgtcatagcgtttgttgatcttttccagtcgatccaggattacttttttggtgactttatcaaggctcaactcttcacgcgacggcatgaagtccagcgatcccagagggaaatccagaatatacgcgtaattgctgttacggtagcagtagaacagcgagttttcgaacatgtccatgtcgattggatagcaaatgttacccatacgcgcgtatacgcctgaatagttgatggacttataacggatgatcccgcgatcgtctgcttctttcggttgccagtttacatcaacctgaacaccgataaagcgcggacggatacccgtaaacggttcgtaaacacgcgccgcttcacgttcccattctgcgatatcttcaactttcacaggaacggtgatttgaacgccgttaggttcgtctgtttcgatttcgtagatttggtcaacgaaaggttcaccattatccatgtaagccgtgtacgcgcgtttaatgccgtcctggatggattcgatagtgaatgtttcagtgtagcagaacggggatttgctacccagtcccagcgccccgatcagttcgtcggtgtcggttttggtggattcgaagtaggttgtaaacacctctttaaccatccagtcacttaaccccgtgccgtaatcacggacgatgaaacgcggatcgagaacagttggcaactgaacatcgaacgggttcatgttacccgctaccatatgaccatcaatggcattacaggagatctcgcgaatgattgcacggatcttgtatttgtagatggttgatgacaggattttgaacgttttcgcactggtagccattttaaacttcgtgcgttcgcctttatcgaagcccgttgtgtgaatggtttgtggtgctaactgacgtaatttcattgtttatatctcacttggtgttaaagatgatgttatcgcatgaatatttcacaggcttttgatcaagcccatactcaacaggtgtacacatccggtcaaggtattcgtaaacctgttgcttctgacgttcgcggtctttcatatccatgataccgaccacgatagcagttacaaaacatattgcaatagtacacagcacagctattgtaatatattttcccgtttttggtgcatcatatggtttcattgaatcgcctctgcatattgttctggtgtcaatttacgcgctactaagcgccctttggttgctcgtttgtttcttgaaatgtagatgtttgcaatgttgcgtttaccttcctggatctcattgtacatcttttcggtcatattgcactgataaacttcaccgttcggagttttcaggaaaaacgcgtatatgtctttttcgctttcctgaattactgatttctcacggatacggcttttggttggcgtaggctgtgcgcccaactcgatagctttacgctgccatacgatcccgtgtcccgctccatgtcctaccagagcatgagcaatttcgtgcatgagagtatctaaaacgttctcgtatgtgtcttccttaacatgatcgcgacgtaactcaatcaacttacgagtgtatgaacactgacctaaagttcttttgaaacgtccgttgattttgaaagaccaatgagataagccatacttcgccatgatgcttttgtcccaaatggttatttccatgtcgctacgagttttgaacattttatatcctccccaaatcagtgagaacactataacaaaaagcctcccgcgatgcaagaggcttttgtaaattatttcaatttcttcgaaagttctttcaaatcattaagatattcagttttcggggtcgtttcttcccagtatttcagttgcttacgcagttcgttcgcttcgtcttccagcttttgacgttcatccgtggttagatgatagatgttcatcgcaaccagaatttcggcgtggttctcgcaacccgtccacgtagatacaagtttaaccgcttcgctgcgactaagccccttcaatgcgtcaggttgtgcgatcatctggtcgatgaagtcaaccttcgccagcgccttatctaacgcttccttagtctcctggatgcgtttatcaatacgctgttggtaaacaccaatacggatatcaacgaagtctttcagcaacgtttcaggacgctcgtatgaatgcagtttcccgttaaagataacgttgatgttcgggtttgagttctcaatcaatccgaaatctttcaggatcttctcacgggtaagcccgtttgcgtactcacgtttcagggtgatttcgtagcggaaatcttctttcgatagatccttatagcttacgatataccctttctcttccagcttatccagaatagaaatatatttcacgcgatcatacttgaccggaatctctgtgatcaccagtttagttttaccctggagttcatacttgccgtacatcgtaccgttttcaatgtcacctttgaaatgcgggtatttcagatccagtgtgaaatctttcccgttcaggtaactaacgcatccattcagaaccgaaatcggatcgtgtggtggaatgttggtagcgtatgctttcgcgatcccactgaacccgttaaccagtaccatcggaatgattggtaggtaataggctggcggtacgtgttcagggtcttcatgtgggattgttaaatcttcatccatgtagatcgccttgaacagcggagacagcttacatttaatgtagcgcggtgcgcctggctttttaaccagacgggaaccaaagaacccatcgcggtcaaaaagcgggatgttattgcaccagtgcgccgccataagagacaatgcctcttcaacggatgtttccccgtggtgataaccatacattgcaacaccgccagcgatagaggctactttctggaagcctgtaccgcctttcgctgcggaatgcacgaagaaacggtgaacgggtttgaacccgtctaccaggtgcgggatcgcacgagaataaattgtgtaaagggcaaacgtaagcccttctacctgcacaacgtctttaatacttctttccatcatttcaccgaaaatttatgttttccgttcacccagtctttacgcggatcggattcatcaccgaaacacagttccagaacgtctttgtattcgtcgcccagtacgattgtatcgtattttaactggtcgcccaacacccgatcgtaatcttctttacgtaaagaacccagccctttgatatatcgtacctctttcgccttatcgcggaacggtgcgaaatcttcaagggagtagaaccatttttcatctttaccgactttcgcaatgataatcggtgtgcggatataacggatctttttcttctcgaacaactcaggccagcggctaaagaacgcaatcagtagggtgagaatatcacccccgtcaacgtccgcatcgaccatgatcccgatgttgtcgtaagtcatttcggaagagtcgcctggatggagattcaggatcgccatgagttcagacaattctttgtttttgagcacttctaagttactcattccccaggtgttcaacggtttaccacgtagcggaaatgcgccttgtgtctcttcgtttctgcactcgataaactgccccacggcggaatcgccctcggtcagaaacaaagtggtttctaccccgtcagtgtcgatccctgatgccggaacatgttttgcaaccttcgcctttttagctttcttcttcgctttggtaatggctgcggcttctgcggcctgtttgcgaatcagagcggactcaatgatcggagtgattatttcagaagtatccataatatgtttcgcgatctttttatagttcagtccggcgtggttgttgaactccccagcggtgttagtcagtttttctttcgtctgactatcaaaagcgggtgcattgaagttatgcaaaaacacaaccaaagtcaagcattcttttacacgggctttcgggatctcgatagcgtgtgttttcttgatcatcggttcgagttcggaatagataccgtcgatcatggtatcaacatgaacaccgccgtttttcgtatccagaccgttaacgaaggatttctgtttgaaaccgtcttctgtgctcgccaggatgaaactgattttgttgtttgtctgggtaatcgttttatcgccgtacatcgcgccatacatcgcgaatttgttcgggaggatatcaccgttatatgtgaatttaacggcagggaaagccactgcaagcgccataaggcgatctttgatgacttcctttgtctcttcgtcgataccgtccacaccgaagatagagaagtcaggggtaaacttaacggttgtcccttgctccttcgtcgggctggtgcggtaatccatgttctgcgctccgtccgtacagttgatcgtgactttgcgtttaccgttggatgtctcaccgataaagattgcgctgtaacagtttgtcaggaaagaaccaacaccgttcatccccattgttacacggttttcgtcatcgaagttagaaccggatttagccattgtccaggctgcaacaggtttaggaacaatcttcccttctggcgttctcacgtcatcttgtggaataccgcgcccgttatccgaaatagtgaccagattgtgatcaatcttgacttcgattttgttcgcaaatttgaaatcagttcggatcgcttcgtcgatggagttatccaggatttcgttgatgattttcaccaacccttccacgtattctactttgcggaatttacccatgataaaacgttcatgggcttctttgttcactgaacccacgtacatgttcggacgtttgcgaatgtgatcgcgatcgctcaagcagaatgattcatcaaccttagcgccctttgctggggcttctggtgctttctgcggctcgttatcgtccattaagaaatctaaactcatattcacctcgttattagttctcaggcattatatagggttctatgaaaaagaaaacccctttcggggtttacttgttgtacgggaatccgtctttcaccatctgcggcttatcaaccgttcgtttcgcctcgcccccgcaatcacaatctttcggttcgtcgcggcttgcgatgctggacattttcggaaattctttttcgcacttggtgcatttataggtatatgttggcattaataaatctctgacaatggaataaaacggatcggggttgcggctttgctgaaaacacattgtttgttccctgcaaacatgagatcagtttcgtacaccatacaaatatatccctgattctccaaaatttgccgctcccagctatcgaaccatttagacaacttctgcaatgaagagaagccgaaaatatagctacgataatttttaccatgttttttgaggttacgcattaaacgaaggtcttcgcatggtgcggggtgacgagtctcggagataccgaagtttaaaccgaactcgattccatgaatatcgagatactcatagagatcgtcttcatcaccgacacaacccgtatacgggcctaattgcttacaccatccatcatatttggataatatagacgcttttaattcaacgcgataaaccaacatgatccgatcctcgtaattgattaactacaagtagagtaccacttatctaatttcttatcaagcagtttgttgatcacttgcgcgatttctgtcgtcccgtgggttgtactcagtttcaggtaaatcacatccagggcacacacgatcgcatcaacgctttcttcgacgatatcaccgccgcgttgaggctgaacgagacattcggagatctccccaacctctgcggacaggtggtgaaccacgtcgctaacggttcgttttttgacgctatgagcggtcttgaaaaacttatccagaactacagcggaattttcgcgcggtacttcctcacctttattgacgtggttgatttcagtttccggttctggtgcaacccataccggattgaaaagccctttcatatcgttgaactttacaggaacgggaataccttcaagataaagaatccctgtttcttcatacaccatactgatccggcgtggtgaattgaagtccatcggattcttacgcaacgcgtcatacatacgacgaatcggatcggcttctgatgccatttgacacacagccattaaaatagatttcggggcgtacatatcgccaactttatacttgctcatttacaatacctttatgataaccaacaataaaacagttcacttctggacgttcgccagggaaatgcacacactgcatgacgcgttcagccatgagttcttcgcccaaataaacagaggtggtttcttcgttgtaatgacaatcatacgaagtcttaacactcataccaggcaatccggcgatatgcataaactttgagttcgtgcatggtttaccctcaatgttctttccgtttacatcaaacgttgcaaacatttcggttttgctgttctttgggcgtctgctcatttcttcacaacctcattatatgttgacaggttccattcatgcacttccggcactttggagtaatgatccaggaatgttaactgaacttgcataacactagcacgatccatattgaaaaggaagcgttgcggggaagtaatacacagaaaatcttcggtgcttcctctgcttgcgctaaactcttttgtttctccgccgtcaaattttgcaaagacaggcgtagaaaagtatggggcgaaaagactacgtttggaatcgtccgtaatcgcgctgaaacacacgtctacgagctttccggttccttcccgtctgatggtgagcattgtccctttcgtgcgccctaagacgtttacagagcgcgtggtgacatcaccaaaagcgtttgtgtaactcacagtctccacaaagcccatatcacgacgttgttttaacattgcttcgtgttgcgcttctgcatcctgttctactactcgttgtgcggcttcatacgccgctttgttcggatctcttgattgccatgcgaagaataaaacccctgcggctatcagtccgaagattgaccaacttgcggtcgctgatagtttcattttaatattccaaaggggccgaagccccgattttagcgaagatagcgaacgtaaccgctacggtcgatcgcgttctctgggttgttgaagatattaccgcgaatacccttagcaggtgctttccatcctgcggctttcaggatattgccgtcattgtccaggaaaccagcaactgaacgctgatcgaacatttcaccagtctgtttgttgcgagtatcctgcacaatacgatgatacttacggcctttttccagaacgaaaacagtttcaaagaattcgttttcgaatgcgccaccgttacgggctttgaacatcgcatccagtaaaggctgtgctgcggctttcagttcgtcaaaagtatacatggcaatctcctaaagtctgtttcgtttcgatgggataactatatcaaagctatcccgtgaagtctttagcaaaaagtgctatttgttaaacccgtttcccttgataccatttcgggaaaataacccggtcaataaaagttctccccaagttgaaactatcaccgaacaggagaacaccaaacaaagggtcgtgcttgatatcgtttttcccgacagtcttcattttcccttcgtggatcacggtgtcacccaccgtgatatccttgatgcttacttttacatgatgcatacaatcacctctgcgagtttagcaggttttgcttctggtctaactttcaacgcatcattcagattcttttcaaccattgctaccgcgtcgttttcgttgaaaccgttcttaaccaggactttaactactttggcttctaagtttttcatgatgcgttccttttgtctgtttcgtttcgatgtgtgtaatatactgcatatcgaaatttgggtcaatacccaaatcaaagaaaatcgtatttttcttttaatttttcgtaatacgtatcccatgccgcttcgtcgttgatgatctcagtaccgaaccgataagcacgtttgcgcagttcgaaacgttcacggatacgctcaacattgattttcactgattccggcgttggttgccagtccgcgcacaaatgacgatgaaacagggagtttgacagcggactaagatcgaaatcttcgtatgcaccgtccatgtattctttaccgttacgcgtgaggtattcagcacgtaatgcaacatgacgatcgcgaaggtatcccagcttattgtaaaagaaggttacgtgtccggttcccagcgtatacacagcagggatttttgacaggttgatttttgccttaccggataaaacggcattggggatgcgagggagttcgcgcagttctgcgatcaggtgttcgttcagcagaagagaaggatcgattgtgttaatacgtgtcatagttgcctccttttggtatgtgcgcaatatacaaaaaagcctcttgcattgcaagaggctattaaaattattttgccagtggtataagcatctttcgcataccgccgttttgtgtcgcatcatacacgcgtttagcttcaataagggaaagttcgatatggtatgatttccctttcccgtcaaaatcaaacgttactgtgccgcttgctacgcttacatgagtaaagatgaactcaccagcgaaatgctttcgaaacgctttgtcatgatctaggaaccattcaaacgcttctccgtgctggtacagtctgacgataatcattgaaactatgacgaaaatcagaactgctgcgacgatcgtaagttctttcatcacttacccctgtttacagattgacggtgcagcacacggttaacgcgtggcgcttgatacggtttcattttgtacggtgttggatcagagtattcgatccggttcggcattgcgtacagttcaacgcgtggttgaatccagcggattgagtcgattaacccttgagttaacgcacgaccgaaacctacaccaactaaacataaacgcataatatccccttactgtgccagaatgtgaagccattcacctaaccacacgatcgcctgataagacaaccacaccgcaccggatacacacgcaatcacaccaatgatcgcaaatccgattaaaatgttcaaaccttctttcaaatcaccaaacatgtttcatcctcttttgtttcagtccctacaaaataacaaagcccctgcacgaatgcaagggctttttatcataattcgactaactgaggcaatttcagaaccatccccggaaggatatagcttgcattactaacggttttacggttcaacttagcgatagactgccagcgctcaccacaaccgtataatttttcagcgattgaatacatgctatcgccaggctgaacaacatattcatcgtattcgactttaacgaacgcggggttcatgagaatgtcaaacatctgcgcttttgcttcgttcagtgtttttgcatgtacagttttacccacaaatgataatttaatcatcttttcctcggcagactcaatggatcggtttcttcttcacttgggggttcttccagccccagcgcatatctcaatgaatagactatcatcaaaacatctttcgcgcaatcgtgaattgaattatgcatcacaaaaccatcaagcaaccctttccgaagaggacaggtcgaagcatcacgcgttaacaggcggttttcgatacatgtacgcacatcgcgactattccagaacacggtcggcatatcttcgaagatgtcgatcttaccaaccatcttacgcacgatatcaaccaggataccgcgatcgaattcagggccacgaacataatcgagtgattgccaacggctcacaccgtccgctttcaggtcttcaaagaattgtctgtgtcctgcatacagttccagatcttccggcgacggtttcaggatttgacgggcttcttcgctttgctgtttccaccaatcgatcgttgatttgtcagcaatgcgatccggttgctttttcaaatcgaacttatattttctcccccgcgaaaccagttccgcgaatgttggcgggttgtgggggtcgtcgataaacggaacgtaagacagttcaacgagtttaccgtttggtgacgggcctacagtttcatagtcccatacgtaatcaactggaagatgtgacattacgaatcctcttatattcttccatgaaaccagccagcgcaagggctactctgggagtgatatcaaactcactgatttcttcgttactcagcatctgcataccgaattgacgcaaaccacagttatatatcgactgttcgagtcgctttgtattttcaacagcttccacgaattcacacagatagtcataatcaacgtgtaacgggatttgctcgcggggtgtctttaaaatcaggtcagcaatcagatccgcatgaagacgagggaatttcatagagatatctgttttcatggtaagtaccacaggtctttgttttcgcgtaagttacgcatgacacgaagaatcatagtaacaacaccatattcttcatatgtaagttcaactgtaagggcgacgttaccccatgaataacttggcccattagggcaatacagatttttattgtagctgtcaatgtatttcagcttacggatcacatcagcaggatcgatagtgctgtacattgcaaacatggaatttgcatgagggtctttttcgcgaatcttttcgactgcgttcagaatctgctggatgtcggtaactttgatactcaatttcataataacctcataggggccgtagccccttatacatagtcaacggtgtaacgtgcgcgggttacgcccacatagattaactgcttacacagatcgtaatctgcgaacgcatacgcatcgcgcgtgtacatgtacgcatggtcatacgtgctcccctgcgatttgtggtacgtgcaaaccggaagaggtttaacatcctggaacttgtttttaatcgcccagaacgaatgccacggggctttataccctgtttgttgcttgatgcgcttataagtgctcgcaacgtaagccagatagttacccagacggtctttcatcaccggatcaacaacaacctgaatctgtgcttcggtttcctcttcgagcgataccgttttcagaagatagaattcaagttcgatcttctcgtcgcacttctccgccttgataacttcccgacgcgggatgatttctaaaactcggattttttcgttgttgttataaacaatctcggtgaagatttgcccgttcaaccgcatttcctgaactaacggttcctgcatcacgatcacttcatcgagaatgaacggttctgttgttttgtacaggtgtttacggatcgttgcgttcagcttgtccacgttgtcgttagtgtacgcgaacatgcggttctcgatcaagtcatccggcgttttaacacggcggaaatactgacggaggaagtcaacagcgttagcatgttggaacacacccagatcaccgacagacatcggtttcagcatcttaccatcgcgtacagcgcgtgaaacctgaataatcgggttcccttctgcctgacgcatgattttatccatacggataacatcaaagatttcttcatcaaagaacggggagagttcaacacgtccatcggcgtttaccggacggatctgatctttatcacccagtcccagaataacagcgttgcttggaatactgcgccggatgattcggaacagatccatatcaaccatcgagacttcttcaacaacgaacacgcgacaggtagacagatcaggcgctttcttgcctttctgctgttcgaacacacgcagttcttcgttagtcacagggctaatcttcaatgcagaatgaatcgttgttgcgtccattccggtagccgctgctaacacgtttttagcctggtgtgttggggcagttaaccaaataccgctaatccccaaccctttcagagtgttaaagacaaacttaaccagtgttgttttaccaacaccagggccacccgtaatagttgtatgaatggcgttctggatgttgtggataacgcgatcatgcgcggacttctgatcgtcactcagatcatcaaatgttaactcgctcataatttgagtaataccccttgaattttcgaattctcaataaaccaacgcatctcttttttctgttcttcggttgctggtagttgctcggttttgcggaagaaactgaaacgcggttcatccggcgtgtagttcagtttggtttcgtagcacttgcggataaaatctaatttatcttttgcaagttgcggtgatgcaaacagttccggcgttttcccgttttcaacgtatggaatagtaaagccgtctttgtctttcgtaacaatgatatagtatttgtcaatcattttcgcccctcatagatgacgtagaaaaaacctataaaccatagcaatgataatactatcaaagcggcttttctgtcaacaccgttaacgtggaaaacgcaccaaccgaagagatacgttatcaccgcgcagacgatataagacaaagcaaatacggcatgtagcgcggcgatttccattagtagttgttcgcccaacgacgcaggttttccgcctgtttcagagcatacagcttgtagatggtttccgcatccattcccagcgcgaggaacttacacatgaagaagtgccactgatcaatcagttcaaacaggatttccagtttgtcttcttctttcatttctgcgaatacctggctacgcagttcttgatgatttgctttccacggtttccatacaccggaagccgcttttgcaccgcgagacataccacccagagcggtgtaaagttcgcgggtttcatctgcaatcgcatcatcttgcagtttcagccagtccaagatatcaccgcacgttttcaggttatcagggcgcggaacccatgaaagggtatcagacaggctttgttgtgcgtggttttgcagatccagcattgattgcagaggatcgccgttacgtgccagaaccttttgatattcggtatcaacaaattccagatcagcagggttaaccaggtgcgcacatgatgtaaaagtgtttttatcagtcatatcaatctcattttttcggtgatttgttccacgacttaaaccgaagtttcgccgtgagtccagaaacagtattatctttcaaatactgcatgatttcaagtttagttgcgccgtccgtttttatcatttcgttgatatcttttgacggccacgggcatttgtcccacaacacaaccttttcgccagcctcaattaattttaaaaggcggtgagtagtatcagggtgtctcgcttcattgtcaagaacccagacacgcatatttttatacggaacatcggacagcgccatttgtccgcccgtaatcgcaccagcattatctacaaacaggctatccagcggcccttcaagcaggtagacaggtttcaacggatcgatggtatcttgaccatacactttcgttgagtgttcacatgctttgattgtcatgtattttgcgttggcattgtcacgcaaggcgcgtccctggaatgactcgattttacccttttcatcaaagatagggatcaccaaacgtggttcatccttcggtaaagggtatgcgtccgcattcacagagttaaccaggtgttgccattgacgcgtaaaccagaggcgatcatatttgtctttaggtatgtgacgacctgcaacatacttaacgatagggtgattttctggcaacgtgtccagacgttcgcagaactgcaattcaggaatatatttcttttcttccttcggcggttcttcgtgcgtctgttttaaatctttacgatccttgaaagattccatcaaatacgccgtataatcatccgggtaatagtctttcagaaacacagaaaacggcttgctgtagttgcagttaaaacaaccacacatcatatgtgtgcctcgttttgacggaaatatccagaaacgttttttgtgcttatccttcatggagtcgccacaaatcggacaacgggaatggatactgaattctccaccccgtcgaacgatttcgctttgtggtaatgatcccatgatacgagttgcgaactctatatcaagatacatgtttacctctatcggctaacttctttctctgtgccgtctaaagtgattttccattcatagaatatcttataaaacggataaggtctaggaatatcgacacccgatgaagtttttctttcgttcgtgtacacgatcgcggtgtcgctcatgtacttgatacggatcggaaaccaggtgtaattgttcgcagtaacccagatccggtaattcaaaggcggtaatggtttcattcttcactcttcatgattttacgtttgcgtttatatggacgcgtagaacccagaacctttggccctttgttcgtgatcgcgcctgtagtcacacccgaagcaatgttatccacgcttccgcctgaatcacctgcaaccatttcttcgttgagtctttcgcgaagttctgggaggttcatcatgatctcttcgtgttcttgctcggtcagattccaacggttccgtagagagtcatacgcgcttgtaaggttcatgaacccagacatataaggaaccgcgtttaaacggcgcttgatatgtcttacagagcgatggaacggggaatatgcttccagttcttccttcgtcttcgggtttttcaatacttccccttgaccgtcgatgatacccagcttgtaagccgtccattcagtccagggctttttcagtaggcgaatcattcgcacactgtaggttaaatccatgtttttgattaattgatcgctcatagtctttactctattgtgaaagtgaaaaggttttgcgcgggttctggttccggttcagggaattccatacagacaacttcacacatcggtttcacgcctttccattcttccagatagtatccggtatcaatgccacaacctggttgcatttcaaggccagtttcatcaagaaactttttgcatttcgatgttgtcgttgattcgtcctgttggaaataacgccgtccagagtaacggaaattcgcggacatctgcgggagaatgaacgtacccgcacgggcaatctgtgaagcacgttcaatcactttatattcaaattccgcgcccgtatacttacccttaaaatcggatgtctttatcttgccgaaaggcggattgctgatcgccatatcaaacatagtatcaaactccgtcgttaacgcgtctgcgttaatccaggtcgcttccggtacgatacgcttacccaacttatagtatgtatggtttaactcaacacagacgatttcacgcggtttggcgtacatcatcatgtgaagcatcgcgaaggatagcccaccgatacccgcgcacaggtcaacaacgcttccactggtacaagcatcaatagtgaaatcgcgagcaagtccgatcggggtaaagaacgcgcccagttcagagttattcgtaaatgcaccttcatggaagttttcgataatgaataacttttcgtcgtaggttagcgccttatcagactccaccagatccattatcttgttgtgttgcttcgtttccgctttcgttaactttgccattgaccttttccggtaataagaacagaggggtagattctaccacatcaaagccccagtcatcaacaatattgctttcccagtcgcgggtttcccacgggctgcaaatccacttatacaccccagcaggatcttcaacctgttcaggcatacccagcatttccgcattgataccttcgtccagatagccaggatgaatattaggccagcgcatgatatcgacatagcctttatcatcaaccgatacgatccattcggaacgatacggactatcgaactccggttcttcgtctggaagtatcatatctaataaatcactcatttcactaaaccttctttaacgccctctttcatggctttcagaacaccgataaaagcgtctttgccaccgatagcgccgatgataagcatcaggacaccaacacaacccgctaaaccgattctgaacaggttccatgcaaacgggatagccagaagcactaaccacgggaacggaaagcccataagtgcgtttagaaccagtaagataaaagcgattgcaagtttcatgatgtcctcctttgtttgtttagaataaggtatcacctttcgagaaggattgcaatacctacagatacaaaaaagcccctttcggggcttaattttatgctttgttgattagataccgaagaacgtttttggcctgaacttcgttacagcagagtttgaattctgggtcgattgggaggaagccccagaggaaatcaacgctaccttcaacatctgctttcccacttttcagcatttcaaccagcaaacctctgtttactacgctgttcactactgcatcgaaataacccgcgctgaaatccagttctgggttcatcacttcgtcgtatgggttgttcagtaagttcatttggtatctcctttaatccgtttcgttgtctacgggagtcatattatcacaatcataactcccgtcaacccctaatcaggattattttgcgttttttgcaatccagagagtcagtttagggaatacatttgccattgccacaacaaacagcacccagaaagccagcttaatcacaccgatcacgatcagaggtgcaaacacaagccaccaggaagcatttgccataaccccgattgctgccagtttcagagacaggaggatcaggaacacaataacgagaatctttttcatttcactatacctttggagggggccgaagccccgttaaaattgaatgtctgtgctgtttgctacttcggctaacttactgcttcggttagtttcagcttgttttaccatagcaccttgtgcttcttcaagcgttttcggcatctgacgacctttataatcagatttgaaccctatatcgctgttgtcggtatccatccagcgttgattacccttacgcacttcgagtttgaagtggttaaagtggttcttatcgccgtaacgggatttgatctgcttgaacaactgcaagccctgatcagctaactcgtcggtctcaatcacagctaacataaagtcagcagtagccggaagaccagcagattcggcaacgtcgcccatgctgatatcagaagcatcccacgcggcgcgggtagtctgcgcaccagtccacattacggtatttgtttcaacagccaaaccgcgaagttcttcggcaatcgctttaaccaggatgtatgtgttttccgccccgcgtacacgggtagaagcacagatccccaggtagtcaacaataatcacatcaggtacgaaacccttcttcaatttaagctctttaatcagcgctttgaagtggttagcgttcgcccctgctgttgggtattgcttaacgattaaacgtccgaccttcgactgtttgaggcgttccatacggttcttatagtccgcataggtaatgttcccgttgtcgatatcgtcaagtgacacatcaagcaggttagcgtcaatacgtttagaacaaacgtgttcagccatttccatactgatatacaggacgtttttacctgattgcaggtaatcagcagcgagagaacaaagccccaaagatttaccaacgttaacaccagccattaagatgttcaatgttccacgttctgcgccgcctttggtaatggcgttcaggatcgggatattgaaagcaatcttcatcgctttggactggtaaagcatccagcgtttttcatagtcttcgaagtaatcatgaccgaccgaactatcgaagctaatcgctaacgcttccgccatgatgtcagggattgccccaacgtcagggattttgttgttgcgttctccagcaggtttttcagcattcgcctggatctcaattgcacgggacagagcgcgatacattgccttgtcacgacaataggtttccgtttctttcatcaaccagtccagatcttccggcgcatttttcatgctgcggatcatctttttggtgtcttcgtagactacatcactcaggctctttttgtccagagctacttctaaagcagtttgtgaaggaatgctgttgaattcctgtacgtgcttatccatcaaatcaaagagaacttgcgcgttcccttcgaaatattcacggcgtaaatggggccacgcctgaacaaaatacgtaccattaaaaaccagatttgaaaatattgtttcgacgatcattgttacctcttaaaccagattagcgaacatctgaaagaaattatacagctttactttcaacgccgcccataaggtcttttcaggctttgggagattaggcttgatctgcgcgtagattgcatcgtgaaccagcggaatcagtttttctttatcttcgtccggcgtactgaattcgactttcaagccgttatcccaatacactttatggatgtacactaagtgtgcaacatcgttttcatcgttgatcaacagttcttgaataacgtcctgcattgcttcatcaagaatgttctttgttttttgttcaatgtccatgattcacctattaaaagggggcaaagcccccagttgtttattactcttctgacatatccacatcatcagggatatcgtcatccaaatcaaatttatttgacggttctacttcatcgtcagaataaagatcttcgagtgctgccccgtcagtgatctctttgtcaggaatacggtatttttcctgaatcgcatcaaggaatggctggtgagtgaacagaggtttccagaactcaatagagttggtttccgtttcacgccatttcttatcttcaacttcgagttcgccagtctcggtattcaggaaagcacggttgcgccagcctttcgttacggtctgaacgaagttcatttccatagccagatccagaagaccagagaacatactgataccgccctcataggtaacatgaagcgggaatttggatttctctttcacgaagcgagatttctcgatgttcatgatgaagtcataaccgacaacttccgtaccttctttcacctgttgtttgcccaggatgatcgcggtatctgcggaatacatcagaccagtaccaccggaaatgactttcttactgtacatttcttgtgtgtcgtatgtgtgacagatacacaccatcggaatatccagatccgccaggtaaggcgtaaccatacggaacatacctttaagtgctttagcacgggtcatgtcctgtttgtcgttgtcagacagggcatcagccagttcttttttactcgcggtgttgcctacagagtccacgaaaatgatcactttgtcgccacgttccagcgcgttaagctggctcacaacgtcatttcgaagttgctcaactgtcgtgatacgagtatacaccacacgatcggggtcaacgcccattgatttcaggtaagacttagttacgcctttctccgaatcgtagaacagacacacagcatcctcattcgctttgaggtacgccgcaaccgtcaccagccccagattcgatttaaagtgttttgacgggccagcaaacagagttaagccggaagtcagaccaccatcgaaagcgccggacagcgccaggttcaggatcggtacacgggttcgagttttggtgatgttattgaaaacatcgctttcagacagaattgacgcagattgactattcgagtttttgatcagttttttcaggagtgctttattagacatttatttttccggtttatatacacgcataatatattcctcacaaatttatataaatggggcatttctgccccgtcaggtcttaccagtcatcaccgaacagagtgttcagggatgcgcgtttttcgtaatcaattttacatgcttccgtgatgttttgcaacgggctaaccacatgtttttcaaataatccgccatagtctacccacttcaaaatatcttcttcgatctcagttggtaaacgcgtaccggattgccatgcgatgcaatcagcttgccacgggtttttatctcgcaacggcagaaccatcaccttttcaccttccatgatcggggtgattccttgaatacccttcgtatggcggttaaagaacagaacgcctttgatgtggtttggtgtccctttgattgggaagccagcaccatcattatattttgagatattgttagcagatgatacaccagctatttctcggtagtcaagcgccttatactcttcttcaaatactttgaagtgttcgtgtaaggattcttcaccttcttgcaggatgcgacggatcgcttctttcaagaactttttaaccgctgtcggtgtactgcttcgctgggtttccattcccatgatctttaatttaggcttctcgtagcgggttccttcggagtcccatacgttagccgcatatcgtttcttagccgtccagaaactacccagacctttcgatcccagaggtggtccagaaatgatttcgcgatccataaacatcaggtgttcgacgttgttcatgtactcgcacagttcgcggtagcccttatcaatgataggttccatgcgttctttactgaacttatccaggaagtcaacccaatggttgttatccctgaacttactttcaccgccgactttcgcgatcacgttgtccatacaaacataaatggagtcggtgtcacagtaacgcacgtatgcgtaatccgtagtgttgcacagttcgttaaggtattcgttaaccttacgctcaatccactgaatagccaactgcccgaacatggtgatcgcgctggcgtttcgaatatcgaagtaacggaaatgttcgttacccaacgcaccataaagggagttgatactgattttacggttaagctgtgcggtgttcgcctgtgcgattttcttctcacacactttcttcacggctttaagcatttgcttagacagcgttttcagtacagcttttgattcatcgctgaaatcttcgtagaactcgaaatcagggttgatcatttggttgtgcgcgtctgtcaggtgttcgagttcgtgcttaatcagttcgagatttcgctcacccgccatcattcgttttttccacgccttacgctgatcaaatactttcttgatctcgaccggaatcacgcctttaacatcgcgtcggaacatccacccgttaggagagcagctaaattcgtcgctaggacgcggcgcagtcttattgatgtattcatgcatcggacgcactgcaaagctgttagcgattgtctcagggcttatattcacctgtcggatgatagatggatacaggctggtcaagtcgaacgatacaatgtaacggtatggagcgacaaccggatctttaacgtatgcaccatcatacggcgttttagtatggcgtttgttttctgggattactttcttctcttcacgcagagagttgtaaatgattgcgtcccacgttttaagcggcgacataaccccagggaagttgattttcgcgtagtatgctacagacagaaccagttcgataaagttgcgtttaccgtcgatatccaacacgcggataacgtcaacgatgttatacgtgatgtatttctggtgatccgcttgacgaagttcagacagcgaaccttcataatcaactttgcttttacctgtttcgaactcagcgatcgcacccagagagtaagacggttgcggggtgaaactgaatttcttatagagatccattccatccatttgagcaacgccgtaaatctcatagcccagttgttcgttcccgtaatggtcggttgttgtcttcgcagtcactttcccgaacgggctgaaatgacgaacaacgttttgcccgaagatgttcaggtaacgggtgatgatatacgcaatatcgaacttgtttgagttccagcccgtaacaataacaggcgtccgctctttccagtctttgatataagccgacaacagcgacttttcggtctggaatgaacggtaaacaattttcttcaagtcttcttcgctgatctcgttttcggtatcaactttcgacgctacccattcatctaacccgccctcgaccagatcgtacacaaagaatttatcttcaacgctgtcatagtgtgtgattgcgtcgatagcatattttgcttcgcggggatcagggaattcaggcgcggtaacttcgatatcaagtgaagcaatgcggatcttgtcgcggtcgtattcgatttcctttctgtaggcatcggatatatacgccagcctgaaatcatccatgcctagcgcttccatgcctacatctttcattcgctgcatccagttttttgcttctttgatgctttcgaagttctttttgatgcaggtcttgccgtaaatgtcgcgatatggcgagtctacacccgccatagcgtgttgaaacattgtaggcgcatattttgttttgcgaacctgttcgcgtccctcagagtcaatgaagcgctcgtagatgtgatcgcccatttgctcaacggatagataaaattcattcattacggttttctttctccgtgtttaatcgtgacaggaatgataccccagccagcttggtcagatcaagcgagcgttgcgctaatttgtgatagcgttgggtgtctggtcgatttaggttttcaaccagtgcggtatattcttccatgatacgggtatagaatttagggaaatgatcccgcgcatatgcgtaggtgcgcaggtcagagagattgcaagtaagagacagtttgatgtcttcgctatgcagacggttgatcagatgatcgcctgattcgatagctttgatgatttcttcaatacgaattttcataatttagtcctcacaagtggtatgtaaccaatataacaaagcccctgcatttctgcaagggcttttgattaatgtccgatccggtacttgtatttcaaagtccattcagctttttgtgcgtgagtcaatacgcggaagttgttctcttcggagaatttcagatccggcgtaaggatggaaaccataccccactcttccagaagtcgcgcaatgttattgcggcgcagttcgtcatcttcggtcatgtcaacctggcgaccgtccagcttcaacagttctttgaagtgtacgataaaataacgcccttgtttctgtaggatgtgacaagactgccacagcattttctttttgttatttgcgatcccgatacgggtcagcgtttcgcgaattttcaggaaactgtcatcgctggacagtttaatttcgagcatgttcatacatcaccatttctttattagttgttcaacctttttctggtcggttttatttttcacaacatcagccaacacagataaagcaactttcatatttttccgcttccactcgtccagtttttcaagctgtttgagttcttcgtaatattccattgctatacgtgtatttacaccgtatcgtttttggagaacatgaaggataactttcatttcgttatcttcggtgagtttagcccacgccccgaaccgcttacctttgcgcaccgtatgcaggtaataatcaaagtgcgcctggtctggtaaaccggaaccgatcatattcatcgtgtatgcaggtatcagcgtttcgatatgctggctcattgcattgtcgatgaaaaacttatcgtatgaatcaagggcagagatccgtaatggtgtcttcccgttgttcagttcttcgagcaccataaacaaggtgttttccttgtctttggtgtactctttcacaagttcttcgatcttgtcccagtctttagaacgccaggccgcttcatgttcgttcagttcatcttcatcgagaaaagcagccagtgacattttaagcctcccacgcgagggtaagcattaagcccatgaacaggtattgcaggtgaatctctttgttcactgccagcccgtactgtgcgttgttttcgcctactgcctgaatgagtgcaaccttagattcgttggtgacgatcgggtataccgcatccagaagtttagccaggaaagtttcatactcaggcgcgtacttgattgcttcggctcgcagtgctttgaagttcttcgctttaagcccctcaatcactggtgtgatgtccgaaccaacaatctcagacagaataccagcatcaattttgccacgcttagaatagaacccaagagctttaacgatggatcgcgcgtctgggtagtgcttcttaacgaatccggcgatcacctgctggtcatattcgattttctcgatttcgaggataccgaaacaacgtttgatcatttgcttcatcagttcaacgcgttcttccttcgacggggaaccgaacttgactaccggacagcgggagatcagcgcagggtgaatcccgttgatgttgttcgcggtgatgataacagtaacgttcttgctgtacgcttcgataaagctacgcatgtgcttctgtgcttctgccataccagggcgatcgaattcgtcaatcaggatgattttaccgcctttcttctgcgtcatggaggacgcgtaacgatccagttcgttacggatgaagttcacaccacaatcggaaccgttgacaaacatcacttccgcatcaacttcgttagccagaaccagcgccagcgttgttttacccgtacctggggaatcagaaaccagagtcatgttgtcgatgcgtccagacttgatgaagccgcgcatcgtcgctttatcagcagcagggagaatgcattcatcgatcgtcgtcgggcgatagcgctgatcccatgcgaattcttcgggagactgggagattttgccgtatttggtttcgattaactgtacgttttcactaagttccataatattaccttcaattgattatcaaaaaggggcttaacgccccttgtgtactactttgtttatcttacttgaactggctggttgcttcaagtaccactacatacgcaacgccgttttcggacgagaatttcgcagcgccgcgagaagagatttcaactttgtaatcgctgttgatgaactgcatgttgtcaatcttcatatcgaaattgaacatgttatcaccttcgtaatcgcccacttctacagagaaggttgactggctttctttacttttcgcggtgattaccagcttgccgttgattggctcaacagacaggtcggtcagtttcatcatgcgtgacgctttgatcagtttttcgaaatcgttcgcgctaatctggaaaatcagatccgcaactggcatttccagacgcttcttaggctgtacgattgtggttggatcgcttgaacgctcaacgattttcattttctcaccacgaatgacgatttcgccagtggacagatcgtgagttacttcggcatcagtgcctacaacgttcagcatgttcaggaatgagttcagatcgtagatacctacatcttcgtcaattacgtcagaaatcgttgcttctgcgtaaactacgctgttgatggatttcgtcataatgaacgaaccctttttcagcattacagacgggttgatctgggagaagtttttcaggatatcgatcgtttgtttagagaatttcatattcaacctatagttttcaattaggcaaaagtgccgttaatcagggattctacaacgcgatccgccgcattgtcaaggaattctttgcttttggactcgttgattttcgtacccgcttcgcgagcgtcgtgaatcagtccggtatgtactgcgcttactgcttcgtcgatccgtttgtaatgctcaaagcgttcagcttgaggcatcgcacggaaaatctctttgatgttttccggcactttacctacccaggatttgcgaacgttgttcagatgcgctacatatacgttttgttctaaattcatatctacctcaaactttcaaattgggggctttcgcccccgtaagcattacagatccagcagtttatccaggtcgtcatcaccggaaccaccttccaggtcaaacggaggggtgttgtcatcttccggtacgcttccgcctacgttcagttgacttacgccaccagattctttagcacctttggactggttgccattatcgaagtttttcagttcgttgtcaaatgagttcagttctgaatccagatccgcaccagcgcttgcgccagcacccattgcagcaccaccgaatactttggtgaacttcgcggtcagttccgcagttggtttgaactggtctggagcagtgattggacgcagatcgctcataccttcgaagatttctttctgacgcgcttcgtcttcgatgcctttgattgggccaggaacaccaaatttgctgtcgtcgtagttaggccagtcgcctactttcttcgcggtcagggtgaagttagcgccaccaaacggacaggtcacagcaacacctggttcatccagatctgggttccccgcgatagccgcagtgattttatccatgatctttttaccgaagcggaacttaaacaccttaccttcgttttctgggtgcattggatctttaaccaccagaatgttcgcccagaacgattgtttacgtccgatcatacccagtgttttttcggcttcgctgcctttcactttcgctttttcgaacagatcgttttcagagatatactgacacacagggcaagcatcgtaatcgccgtgggtagatgggcagttttcgatgaaccactggttattctttttgaatgaatggttgacgatacgcacgaacgccagttcatcatcagatcggttaggcaggaagcggatcaccgcagaaccgtttttctgtgcatcgacaccgagtttccactctttttcatctttctggaagccggaggaacctttcagagcggcgacttgttcttgcagtttggttggatcttgacgtttaaagaatgacatatgttatttctcgtttaagttaattaaagtttgtttcattaagtttcggtattttacgatttcttcgttactgatttcaactaattttctgtatgcgtttagttttttactaaattcattccagacgaaatccgttgcgatttcatcgtgtttatttatgatgtctaaaaacgagtcgaggatcaagaatgactcataagaaatcactccagaaagtacgagtttgctgatatacgaggttgatgatttgacgctatactgaaacaccgtagagaggggaatacctttcatgcgggaaaattcatacaggttttttacatcgtccacgaaaatattatcaattcgcctcaacttgcctatgtattgacgataaaacacgatcgtatcttcgtctacatccccgacccagaagtcggggttagctaccatgttggagagaagtataagatatatttctttgaatgtaaacctttcggctaactttttgaaaaaatacttatctcttctcttttcgaacgctttttcagtgatctttatttcccatttgtacttgatcgcgtcatacttcccagcaaagtgatttttcatcaccaggtacagtttgtataccgcgatcggtttcaaacgggaattagcgtctgaactgtcaaacggggttttaaatttcacatgaaatcatccagggtttgcgtcgtcgcgtggtctttagccacagaaggacgcagcagattgtttttaatggcttcgtcgctaatcttgtcaatgatcgctttcggtactgttttggacagcatagcataatcaatgctgttttcgtccatccattgtaacgtagcttccatgtaggttgccccctcagaggcaaccagattttcgatatacaagccgacttcggttttgtttccgatttcgctcatattacgccttatcgatcacatcgtacagttcgataagttcgttgttctgttcttcgaacgcggtacgtgcctgttcgtgatacagtttgaacagcttgccgaaggttttgccgtcgataccataatccgttttcgctttggatttgatatctttgaaagaaccctggaagtgttcgatctgagttttcacgttcgacgcttctttgatcagttctttaaccgctttagcgatgtctggattttcttgcagtaattctacactcattttgttacctcaaaagtcacttagtttttcatacatacgggtaagtttgcattccatgaagtatttctccatttttgctttgttcccgatttttggagcattgtacgcttcttcgattgccgttgcaacatctttcggaataaaatcaaagtcgcgaagttcttcgttttctctgtagcggatcgcccactcttcgggcatacccacggtcggatcgtccgcttccagccaggcttcgagttccgcagcgtaaattgacggtgcgcgttctccttcaaccttcgtaacaatatagtcatttctgatcttaatgcaagcgatactatcttttttatcgcctttaatgatcttcatacgcaaatcgttacgcggtgaaccatatttcggtgtaacccatttcttttgtgttggcgaccactggcgcacaccctgatatttttgaagggctgcaaagtcaccatcagcagaaacgatcagaacacgtttaccttcggataccgctttacgcgtcactacaccgatcacatcatcggcttctgcgaagtcaacgcggatacctttgtacggtagattagcacggatttcatcgtatgtcggatgaaggaaactattcaggcgatcccagtcccaatccgatgattcttgttccatttttcgtttctttttgtagtaccatgctttacttctgcgccaatacttgttatcatcaaaggctagaacaatttcagggtactcacctttgaatttaaccacattgtgacgaatggtgtcaagcactatgtgacgaacaatttgttggttgatgtcattctggtctttcggcttgaagttgttcatcaacgttgctaccgaaaggtttgaaatatctatacacatcacatcaacaggatcatcgtcattgctcattaagctgttcaggttgaacatacttgcaaatgaagacatttcaatacctcgttgttgttgaatgaaactgattatagtgatcactttttcaaagtcaatagatcatttcaaaaatctgagcgaagcgaaggacacgaacgtagtgagtgtctatgtactgaatgtacgttttaatatttttatattttatatatagagaaaacagtacatttccgtatactttttaaccagatctaactatccgtttcgcttcgctcacggaagcgcttcgcgctgattttattaaataatatagattggaagtaggtttgaaacacctgattcaatcggctataatgaatgtattcaatttggagaatataatgactacaaagatttatgcagataatgataagctgtatccagttatgtgtaagtggaaacagcaaatccgtgaaactggtgatcgtaagatgccggatgaactcggtattgcgattatgaatattgctcacggtttggcacgtcgatacaacttcaaccgttattccgaagactggaaaatggatatgatcgatgatggaatttcggcaacgatttccggccttcataactttgacgaaaccaaatatacaaacgtctacggttacatcaacaaggcttgctggcaagcgtttgtaactcgtattctctacgagaagaaagagaacgcgaagaaatacaaatacttcctggaacatgtctatgacagcgatgatactgatatgacaacgatagccgatgaaactttcattcaggatatccatgacaaacttaatcagtatgaagagtccgcgaaaaaacccaaagataaaatcgaggttgtggacgaatcgccaacattggaaatgtttctatgaaaattaaaattgacctgaacaaaattttagcagatgctaacgacgaaattgatctgcttccttaccttgtgaaattagagttgcagagcttagggattccgattatcatcgaccctacagatgtacgagatccagacttccagataacagaaggtcgtctggactatgtaataaacgccgaaacaatgatcatggagatcacttactatgaacgtgcagcatgaagtaatcgacgaagtacaccaaaaatcagcgctggatcttcgtgaagaagaactggaatccgtcaagggtacacgcattgaacaagaagccctacgcaaagcgcaaaagttcatgcggaagaacaaagcggaatggaagcgactgcataaacacgcagagaacgcactcttcgaaggtaacaaagagcagtacgtatacgcgatcaaaaagatgcgtgatatgctcaagcaaccatacaacgatgaactgattgaaacgatgtggatcacttcgaaccagcagttgaaagacctgttcatcatggcttctgaaaaatacggcaaataaaccccttcgggggttttgaggtttatatgaactatgttttaattggggatacccatgccggacttcgccaggataacccctggaacgaagaaaacctgtatgcggtattcaaacagatcgtagagtattgcaaagaacacgggatcacgcgcggcttccatgctggcgacttcttcgacgttcgaaaagcaaccacacaaacgacaatgaattttgttcgtgaaaagctggttcctcttctgattgaggcggggatcactctggatgttcttgtcggcaaccacgattgccaatttaaggacaaaatacgccccaacgcgccacgcgagatactaagtcaatacgaatgctttaatgtcattgacgaaccgaccacggttgatttaggtggcggaaattcaattgacctgatcccgtggatttgtcaggaaaatagccagcgtatttttgactacatcaaacaatcgaaagctaacttttgtttgggacacttcgaactgtctggttattatttctacaagaacagcaaagccgatcatgggctggaacctgatttcttgaagaagtacgatcgtgtttactctggacactatcaccacgctaacgagggtgacaacgtgttttatatcggtacgcctctgactatgagcgcgaacgacgaagacgaaacacgcggattctatgtgttcacgggcaagcctgaattgactttcatcgctaaccctgtgtgccaccatcgccggatcatgtatccagcacagaaagatgttgatcttgaacagttccgcaactgcgcggtgcgtttgattgttagtgaaatcgatcaggggcttgcaaagttccaaaccaaaatcgaagaaattgcctatgaaatcaacatcatagacaaagttcaaacagattcagatgtcgataccgactttgaaatcaaaaccgttcgtgggcttatcactgagtatatcgcaaacatgcagatcaccgacgatgaaaaagaggaagtgaataagcggatcagcgaactctacgcggaggtgtcaagtgcatagccgttatgatgaatatttcggggcgaacccccgatattctcacctgttgcgtatgttgggaatgaaacacatcattgccacttctgacgaagcaggggaaaccagcgcagtttgtttgaccatcatgaagggtgtatggcattcatcaagaacatggtcaatcttcatgcttgatacactggacgatgatacgctatcatatagtattgattcatcagttattcaactgatcactgaattatgtgaacggattttaaatgaaactaaacttcaaaaaaattaagtatcaaaatattctgtcggtcgggaataccccgatcgaactggaatttgatacagcaaagaaaaccctgatcacggggaaaaacggtggcggtaaatcgacactgatcgaggcgttaacctatgccctgttcggtaagtcattccgcgatctaaaagtcgggcagttggtgaacagcgtcaacaaaaagaaatgcctggttgaactggaaatcgaatacgggaaagactcgtacaaagtggtgcgcggacaaaagccgaaggtattcgagatctggaagaacggcgagaaattgccggaagactccgcagcgggtgattatcaggcacagcttgaatctatgctgaacatcaaccttgtgggcttcaaacaggttatcgttctgggtacagcgggttacactccattcatggaactgaaaaccccagaacgccggaaactggttgaggatttgctttccctgtctgttatcagtgaaatggataagctgaacaagtcatacattcgcggtgttaatcagcagttggatacactctcaatgcagggtaatcacatccagcagcagatcgcaacacaccagcgcttcattgacgaacagcgagcgaaagcaaaccagaacaacgcccgatacaaagagatctacgatagccacgtagaaaccgcaaagaacatcaaagcacagcttatgcagttgcaagcggagattgcggaatcggtgatcactggagaagaccggacggaagatatcaacaaactccgtgacggttattcgcggctttcaatgactgtagaacagtttaaaaagctggaggtgatgtatcagaaaggcggtgagtgtccggcatgtaagcaagcgattaaacccactcctgagcgtatggcggagatcgcagagaacatcaaagcgggtacacaacgtttaaccctgatcaaaaccaaacaggacgagttacaagggatcatgaatgacttgctacaacagcaacgcgcacttaatgccctaaaaaccaaatatgaagccctgaaaggtactctgcaaaacgaagttgctaacgctaaacgcgcacaggcgatcatggaacaggcaagcgcggaagtagtcattgatgaagaacccgtgaagcagttgcaacagcaggaagcagaactgaacgaaaaacgacaaggctacgtcaaggaaaaatatattcgtgatattgttacggatatgttgaaagattccggcgttaaagcgagtatcgttaagcgttatattccgtacttcaacaaacagatagcatattatctggatctattgggtgctgattatcagttcactttagatgacgagttcaacgaatcgatcaaatcactggggcgcgatgatttcagttatgcgtcattcagtcaaggcgaacgcgctcgcatcaacttgtctattctgttcacatggcgtgacgtgacaagtaaagtatcaggcgtggatctgtctctgctggtacttgatgaagtgtttgatgggccacttgataaagagggttcattcgcgattaaatccctgttggattctgtagatggtaacgttattgtaatcagtcaccaggatcttgatccgcaggacttcgaccgccacatcatcatgtctaaggttggacggttcacaaaaccaacaatcaaagatatggcgatctcatgttagaacgtgaatttgatttaaagacctctcccgaagtggagaggttttatctccataatgaactattggaagaaaaacatgtagttacaatggcagatgttgaggaagcattcaaagataaccccattgaattgacccgcatcaagaataataaatcttctgtgtggttcctcgaaaaaatctattgacagtaaaacataaataccttaaagtcgcccgtgtactgagttgcacgggtttttattttgaggaacggaaaatgattaacgaacaaatgtcacacagcgaagcattgaagattttgggcgctactggcgacgaatctaaagctgaactgtcaaagctctttaaacgtgcttctctgcgcaatcaccccgaccgtggtggtagcactgaactcatgcagaaaatcaaccaggcgtatgacgttgtaaccaaaacaaacagcgctggtaaaactttcagtgatgttcgcgcagaacatgcagcaaacaagaaagcgtgggaagaaaaatttgcagcgtatttcgtgctggcgaaaaactatttcagcactaaattcaacgcgcaagaatttgcggaatatttcacgaaattcaccggacaaccaacaacctatacccagacaatcagcgaagttcgcggtcatacggttcacgcaacctatcgtttcacttctggtgatgcgttctttgacttctctttctcttgtcaaccgccgaacggtcaaggtttagcagcgccggacgcgtccgcactgggtagcgtatcagttaatactctggttctggttggtacgaagaaacacaaaatggcaagccgtgattaccaatggggcaagaacccagacaaaatcacgccggaaagcctgttccctactaagaaactggaatccatctttagcccgactaagaaggatctcaagttcaaacgcgcggactacatgacatcctttgcccgtatcctgggtgcgaaggttagcggtaacgatgttattgttgatgttggacactataaagttcacttctaccgtcacgtattcatgcgtaaaggcgcgtatgtgttccagtatgttgttgacccaactgtgaacaaattcaaacctgctgaacgtctgaaaggtactatgctggaagatgaagacggtgcatgtctggatatgatcatcgacactttcaaagaaatgcagaaagtgaaaccagacgcaagcggcatcgcagcggtaatcgaccggatgaacgcagagtttgcagcggggcatcgttcagcatcttttgttaaacgtaccgcacagcaagcagcagcgccagcgccggaagagaaaccaaaacgcaccgttaaccgcatcaataaagatgactatttcaacgcactgaaacaagcgggggcaacattccgcagtaactacggtgagtttgataacggcgcgggtttgactttccacttcaaacgcgagatcagcaaccgtaaaggtttctggagtttcagcagctttgatttcatgcactccggtcagaaacatgttgaatggttgaaagatatcgacattgacgaggatagcaaaggcgcaagtatcggtttgttggttgataccctgaaacaacttcgtggtgttgctgactggtacacagcccgtaagatcctggaaggtatgcgtgataacttcaaggctggtaaattctccgcacctcatgtgaagaaagaagccgaacagaaacgcactgaaacgcaagctaaggacgagttaggcgcacagcctacgaaaccacaggcagcgaagaaagaatccccagcggttgataaggcgcatcaggcacagatggatcgtgagaagtcacagatgaatgcaaccatccgttctatgctctctgccctggttaaagccggacgcaaagacacgccggaagaaattaaaaaagcagttgatgaagcaatcgctctttggcgcttgaaacactaactggttatgctataatgggaactgttgaaaagcagttccctttttttatgaggtgagtatgattattcaggtatcggttcagggcaacaccctgacagtaacaaattccattatgaccgctatggctgcatgtcgtgatcatgtgatgtcaaaccctccggtaacggaaattctggaaattgatgtatgggaagacggtgtgatcgaagaatcatttggtttcactccgttagaggaagatttacgtaaaatggaacaatggctatggcaaactgtaccccaatgaaactaccaaaacacacaaccctgttaacccgcgaaaaacttcattctgttgaatggagtccgttagatgtgatggtgttcgatctggaatccaaaatcatcaacgctcatgttaacggtttgagtatcttttctgttgaatttgaaaagattcgcgggtacaatgaagcctgtaaagacaaattgcgcgtcatggttgaagctatgggctacatcgtgactattgaagacaacaaaatgtggatcgcgctatgagcaaagtaaaagcagttttcgccgttggtcatgatatgtacgaagtggactatgcgtttggttatgaacagggtttaccgtggggccactgcaaagaggatttgcagaacttcaaagaagaaaccgcaaatagcgtcctgatcatgggtgcgaacacttttacttctctgcctggtaaattgccagggcgagttcattgcgttctgtctgcatccggtcaacgtctggtaacaaagaacgggaataccgctgattatgtcatccacggtggcgggttgtctgctgcaatcgacgtaatgaaagaaacgcatccagatcgtgatgtgtgtctcattggtggtaagtggttgcttctgcaagcaatcaataatacaatggttgatgaagtggttgtgacgcacatttacggacatcatgtatataatgcaccagcttttaaacgtgatgtttcattcacggttcctgaattctgtgaagcggttctgaaatatgaactgactgatttcaaaattcagcagatcgaatcaaacgaacgcgtcagaaaaattatcgtcgatcgacatacgaaaaaggcataaaatgaaacaatatcttgatatcgtcaacaccgttctaacacacggtactgaatcaaccgatcgtactggtgttggtacactgcgcatcttcgggatgcaagcacgttggaacctcgcagaaggtttcccagctactaccagcaaacagctattcttcaaaccgtgtaagcatgaattacaatggttcctcgaaggttctaccaacgtggaaacactgcgtaaaatgacgtggggtgaagatagcgataagcggacgatctgggacgataactacgaaaatcaggctaaagcgctgggttatacgcatggttatctgggaccgatctacgggcatcaatggcgctcatttggtgcggaaggttcttattatggtgttgaccagattaagaaagtcatcgaacaactgaaaaccacaccagacgatcgcgggatcatcgtttctgcctggaacccgatggatctggatgatatggctttgcgtccgtgtcactgtttcttccagttcgtcgtaatcaacggtaaactgtctctacagtggtatcagcgttcagttgatgtcttcttagggttgccgttcaatatcgcctcctacgctctcctgacgcatattatcgcggatatttgcgggtatgaagtgggtgatctggtttggactggcggtgatgtccatatctacaaaaaagcagtagaacaagcgcaagagttgttgaagccggaacgcgcaccgcttccacttccgaccctttatatgccgaaggtaaatagcttacttgatttggatcaagaattctttgactccatccatttgaaagactataatcaccacggctcgctaaaagcagctatggcagtataaacaaagggggcgaaagcccctttcttaacaaggtaagataatgagtgatattaaaacagtagtgaagtcttctggcgtaagtcaaacgttcgaaaaagaaaaactgttcaaagtccttaattgggcgagtattggaagaaatattgatgttaacgcattccttgaaagtgtcgttgacctgcttcgtgatggtatgactaccaaacagatccaggctgtagcgatcaagtatgcagcggatcgaatctccgcaaaagaacctgactggcagtatgtagcggctaacctcgaaatgttcgcccttcgtaaaaccgtttacgggcagtttgacccgattccgttctacgaacacatcactaagctggttgaggctggaaaatacgataaagaaatcctgacaaaatggactccagcggagattgattatctggaatcgaaaatcaatcacgataaagattttgaattctcgtatgctggcgttcagcagttgatcgggaaatatctgttacaggatcgcacgtccggcgacatctacgaaacaccacagtacgcattcatgctgatcgcgatgtgtctgcatcaggacgaaaaacacgctgataaaatcagtcatgtaattgacttctataacgcaatttcggatcgtaaactgtcattacctacgcctattatggcgggtgtgcgtactcctacgcgtcagttctccagttgtgttgtaatcgaatccggtgattctctgggttctctgaacgctgttacgtccgcgatcgtgaagtatatctctcaacgtgcgggtatcggtgtcaacgccggacacattcgcgctatgggttcaaaaatccgtggtggtgaagcagtccatacaggcgttatcccgttctggaaacacattcagacggcggttaaatcctgttcacagggtggtgttcgtggtggtgcagcaaccctgtattatccgatctggcatcttgaagttgaaaacctgctggttctgaaaaataaccgtggcgttgaagaaaaccgtattcgtcaccttgactatggcgtacagcttaacgatttgatgtataagcgtttaatcaataacgattacatcaccctgttcagccctgacgttgcgaatgatcgcctctatgacgcattctatcaagcggatcagagtgagttcgaagaactgtataccagtctggaaaaagacccaacggtacgcaagaaacgtattaaagcggtagatctgttccagttgcttgttcaggaacgcgcacagaccggacgcaaatacattttcaacagtcatcacgtaaaccagcagggtagtttctctgttccggttcgtatgtcgaacctgtgctgtgaaatcgcgatcccaacttcaccgctggacgacgatgataaactggctggcgaaattggactgtgtacgcttatggcgatcgttctcgataatgccgatataagcgaattcccagcccttacacgcatcgcagtacgcgcactggataacttgctggattaccagaactaccctgttgcggcggctctgaaagccaaacagcgtcgttctctgggtgtgggtatcaccaactatgcatcatggctggcaagcaactattgcgactactccgaagcatacgccggaaacgttcatgagttgatggaagcgtttcaatttaacctgctggttgcctctatggaactcgcacaggaacgcggtgcatgtggactgttccacgaaacgaaatatgcacaagggctgttgcctattgactggtactgcaaaagcgttgatgaactggcatcacctgtgtataactgcgattgggaatggttgcgcggtgaaattaaaaaacacggcttgcgtaactcaacactttctgctttaatgccttgtgaaagtagctcgcaggtgagtaactcaaccaacgggattgaacctccgcgcggccctgtgagtgtgaaatcttcgaaagaaggttcattcaatcaggtagtaccaaaccagaataatcagattgacttctatgattatctctggacaatggcaaaacgtggaaacaaaggttatctgtcgcacgtagcggttatgcagaagtttgttgatcaggctatctctgcaaacaccaactatgatccggctaacttcccagatggtaaagtgaaatctgaaatcatccttgaagatctgctgtatgcaaactatttcggcatcaaaacgctgtactaccacaacacccgcgacggtgcaggtgaggaagaagcggaagattgcgaaggttgcaaaatttgattcaatgccccttcgggggctttttataaggtaaatccatgttaactgtaatgaacacaaacccagatcacaaacacttagaacagcctatgttctttggtgaggatacgggcgtagcacgatacgaagaacagaaacaccgtgtattcgaaaccctgactgaaaaacaactgtcattcttctggcgaccggaagaagtggatctgtctatcgaccgtatgcagtacgcgaaaatgccggaacacgaaaaggttattttcgattcaaacctgcaatatcaaaccctgctggataccattcagggacgcggcccgaacctggcgttcctccctatcgcttccgatgtctcaatggaaacgtggatcgaaacatgggcgttcagcgaaacaatccatagccgcagttatacgcacattcagcgcaacctacacatcgacccgtcgaaagagttcgataaaattctgcgcaacgaagcgatcatgaaacgttcggcttccatgacaaaatactacgatgatctgatcgcagaatgtcatgaactgaaaaacattgtgctcaaaatcgaaatgttaacgtcccacggatacccagacgaatcgatcgcagagtacgaaaagaaacgcaaagagcaaatgcgtaaatgcaaggttgctctgtatctgtgtatgcacgctgtcaatgctctggaagcgatccgcttctacgtgtcgtttaccttcacgttcaactttgccgaacaaggcaagatggaaggtaacgcgaagatcatgcgtctgattgcccgtgatgaagcacttcatcagaaaggcactcaaagtaagatccgactctggcagatgggtaaagatgacccagaaatggcggaaatcgcttaccagtacgaagaagaagcgacaaagattttcctggaagtgtacgaacaggaaaaagaatgggctgaacacctgttctctatcggtgatgtagacggcgtatccctgaaaagtacgattgcctatatcgaacacctgacagatcagcgtatgcgcgcggttggcttgcagtctccatttaaaccaacgccgaacccgtatccgtggatgaacaaatggttgaagtctgacaacgtacaggtagccccacaggaagtagaagtgagttcttacctggttggcaacctcaacaccgagatcagcgacgaagcctatgcaaaatggcgacaaaaatacgcttgattgtcgcgtcgtaaacaagtataaaggtagctgggatgtcgatattcagagaggtacgaaattcggcaatcccttctacaagggaacacgggctgaaaacataatgaacttcatcccgtatttccaaaacttgattcgaactggcgtgatcacaatcgacgaactgaaagcattggacgggaagcggttaggatgtacatgcaaacctctaccgtgccacggtgattatattgctcactgcgtcaatgtgttgaccggaaaggtgaataagttggatatataatggacgatgtaacatttggtgtaatatttcctttgcgtctgggttcagacaaaaggatagaccggagttttgttaaatgtggagaattccggcattgtgtgtattttattgaaatcgacggtcggatagtgtatgttggaaaatgtcgtgatttgtggaagcggttagacacataccgcaattcgaaatactggcgggaagcaaaccccagtaatattctgaaaaccgcacgtctggaaatggcaatcaaaaaacgtaagcgtgtaaatcttatcgtgacaacacacgatgaagacacatatcatgattttgaaataaacatgatccgaaaaatcaatcctgaatggaacaaacagcactatgacaaagctaaccaaaaatcagaaaaccctctttgaccagttgatgaaactgtgtaacgaaagcgaatgcttctacttcattgatcaaaaaactgtgatgcaaaccaacgtgcgcatctttaactatcgcatggcgagctattccgactggttaaaacccggtgcgctggaatgtcgcggtatcatgtttgcgatggatggggatacccccgtaaaactcgtcagtcgccctatggagaagtttttcaactatgccgaggtaaaggcatgggaagcactgaaatcctctcctgtgacgattggtgaaaccgtagtggatgtgatgattaaggaagatggttccctgatctccaccttctgtgattccggctatctgggcgttaagtctaaagcatccgttcaatctgaacaggctatggacgctatgagcgtgatccagactaaccgcgcattgttcgatcgcctgaccgaactggttaacgatggtttcacagtcaacatggaatacgtcgcaccgacaaaccgtattgtaattggctatcaggaaccagcagtggtgatcctgaacatccgtaataacgacacgggcgaatatgtcgattatcaggatatcttcgcagatggtgtattacgtccgttcctggttgagcgcgagaaaatcgaaatcaccgatctggatgcgttcattaccgaagcctacacgaaagaaggtttcgagggttacgtgatcaaaactgataaaggttttgtgaaagcgaaaaccaactggtatgtaaaccttcaccgcacgaaggatagcatcaacaataacaaagatctgttcttaaatattgttgaaaataccgtcgatgacctgaaacaaatgttcctcgatgatatgtacgcactcaagaaaattgacgcattcgaaacgttattccttgatagtctcaatcgtctgactgcaaaagcattccaggcaatcgaagacacgaaaggcaaatcacgcaaagactacgcgatcgccctgagcgctgacttaacccctgacggtcgtattatcttcgggcctatgatgcgttatttcgatgataccgataagcaaaagctggttgataacatcgttgcattaatggcgaagaactacgaacagtttataccggaagaatataaatgacaaagtgctttggcgctggaagcacaacgttagaagaagagaaagcagggatcgattccctgcttctttacgttgacgttttcccagaaaccggaaaaattttttggaatagcaatgcagcaaaacagaatcagggaaaagaagctggttctattatgagcaaatcaaaaccttacgtgagaattcggcacggcgatagaaaatatttaagacatcgcataattttctattactgtaatggttatctgcctttgcttattgatcataagcatgggttggaagctggggatggtatagaaaatctacaggaatcagatccgcttcataatatgctgaaaagaaaagctaaatcaacacctaaaacggttaaatccaaaggtgttgattacagggcttcgcgtggaaaatatcgagcacagataaagatagacgggaagcaaaaacacatcggttactatgataccgaggaacaagcatcaatagcttacgaggaagcgttatatgaatatcaaaaacgtattgggtacgtttaatataagttcgtggatatggcctgtaatagttgctggttcgttagcagggcttttgtacatgacaatcacgctgaaaagtgaaaatgaccaattggctaaagatatcaaagagttacaggctgatatcaaaaaagtcaaagagacaaacaacaccaatacggtgatctatgtcgaacaaaaaggtaaggatcagcagttggtcaaggatgccggacgtaaagacctgttgttcaagaaaccaggactgatcgaaatcaagatcaacaagtccttcgaagagtatatggcggagtacgacaaatgaaaattgcaacgttagcccttgttctgggcgttctgttggtcgggtgtgctgagaagcccccagaaaagattttgcctacgctccccgctaaggtgaatccggtgaatgtgaaatggaaagtggttgcagaagtccgagagattgacggtaaaaaataccttgtcatgccttatgacggcaatccatacgttgccctttcatatcccgattcgttaatcttccgtagctggatgaatgacgttaagcgtcagaaagaccagacggataacattctgtgtaccgtgggataccctgagaaatgcaagtcaaaataatcaagtcatttttccgtgacataaccgaaggaaaggtttatgatgcgaagaaggacaaagaaggtctctggatcgaaaatgactggaaccgtgatatgtggctcaatctaacgaatgagcataacaaagaactgattgaatatgagattgtgaaatgaatctgtttattactgtaggcgtaccaggtagcgggaaaactacatgggcgaaagaaaaagcgcgtcaactggggaacactctgactgtttcccgtgacgatatccgcaaaaccctttactgtgctggcggtgatctcactggctatcgcttcaccgaagagaaagaactgtttgtttgccgtgtgcaagaagatacagttcgtaatgccctggcgagtgggaagaacgttatcgttcacaatacccatttacaccaaaaagatcatgatgtgtggcgagagatcgcgaaagagttcaatgctgatttccatatcgaatggattgatgccgatatcgtagaactcctgaaacgcaaccataaacgcggtgtgaatgctctacctgtttcccgtgtctgggcgatgttcgaacagtaccgtaaactccgtggctgggttccggctatgagctatgcagatccgagcaaaccgaaatgcgtcatcttcgacgttgacgggacattaaccaaagttggacaacgtagcccgtatgacttcacgaaggttatcaacgatccgcctaaccctcctgttcaagaactgttcaggatgtataaggccgctggttatgcctgtgttgttgtgtctgggcgtgagggtactgtacagtgcgcacatgataccgctgcaagcctgatcggatacgatgttgacctgagcgatggtatctacatgcgcgaagaaggtgatcatcgtcacgatattcacgtaaaagagcaaatacttgttgaaaagattctcgataagtattatcctgttcttgcagtggacgacagggatacaccagtcgggatgtggcgaatgaacggtattccgtgtttccaggttgattacggcgacttctaaaaaacagttgacagtgagtgcgggtgtgataagatacccgcacaaacaaaggagaatattatggttattcgtgaaaatgaaaatgtgatggttgaactgggtgatcgtgttaaagttgagaatcctgttgaacttcaactgaaactcaaccagttaggccagcgcattgctgataaaattcctgctggttatacagtgaagattgtccgcgatggtcagttctccttccttctgggtattttgagtcaacgtaacatcgttgaacagcagttcgggattcagtggaatccggtaactaaattcgtagcatgggcgggagtattatgagcgacaaaatcagaaagattcatcaggcatggttatgtactgaaccaacgatgcttcgttatggttgtgtgtttgggttggttgataatgatcctcaacaggacattgcaacaagtccggttgttgaatatgcgattccggcgaacaaatcgtttgttgaagtggtgacacgttcaggtactacgtatcacatcgtcaaccctgataacgatttcatcaaagacattctgaaatatatggatgaccgttaatgaaattcaaagtaatgaatatgttgagagcaatcgatcggagtcaacgttctcaatgtatttcgaatcgtgtaggtgctattatcgcgattggtggtcgtgccgtcgcgtggggcgaaaataatacggttgaccttgattgtcgttgcaactcatgcaacaatcatatggtgaatgatgacggtaaactgaaagcggttgatcgtcctgaacattcagcatggtcaaacgataacgaaattcatgcagaaatgaaagcgctattgagtgcgcacacaagaggtgttatactcaaagacgcagcactttacacaactgcatcgccttgccctaactgtgcgaaacatatcgaatggtatgttgctagcggggcgattacatcggtgtattatctcgataaatacgatcgtggtaatgatgaatggatttcacgcttgcagaaatatggctgtgtcgtggaacaaattaaacgggaagagttagaatcgtttatcgacttttccaaagtagtgtttaacaacaatgagtaaagaaatgtctgaactgaaagtaaaagcatccggcgaatatgtgatcatcgaagctactgcgcgtccgcagggttccgaaatcaaatctgaatctggtatcgtggttggtgtacgccagcacggggaacaacctttttatggtaaagttgtttctgtaggcgtagacgttccagcagaagcggcagaacgaatcctgggtaaatatatcccactgccaagcgctcacatggcgaatgttcctgaccctgatctggttgcgggttacatttccgaaaaagaagcaaaagagaaggaaacaaaatacgtttccgcacattacaaagcaatccaggcaatctacgagatctaaaaatggctaaatcaattcaagcaattatcgctgataccgtcagcaaatccaaaaagctgttcgacaaaggcgaaattctggaagccccagcgcgtattgacgtaatgacagcaatgatcattgatgcgcatcagggtaaacttaaatcccgtgccgatgaagtcatggcgtacatcgtccagttcgaagacgtatgtaagtacgcgaaagatgttgatccgttggttcgcgagatctatcgcaaacagttctaaaaaaattcgcaggtgtagttcaattggtagaatatctggtttccatccagattgttgagggttcgagtcccttcacctgctccaattcgggtgcgtagcgcaatgccgttaaatggttcggaatatgcaaccatatcccacgggataggctctgttggtatccggtaataggttccccggaatgcggggtgaagtaaagaaacttccagcccactaaacaatgtgagatctatatgagaattcgtgaaaagacggtgtatgactctaagttaggcaaaacaatccatacgttcaaagagattacgccagcgcaattcaaagagcggtacggcatgacattcaacgaatggaaagcggggttatgtaaaaatgactaccgatataaattaaaattccgtgaatgttatgttgatgacgatccttatgcagcagatgtatgtggtgaaacagtaccaattatcgagaattcgcccgacgcactaatccaatcttgtatagacgcagcatatgaaatttaaaagagaaaaatatgaaaggtcttcaaaagctgtttgaattaaccccaaaaattcgcgaaatcgtcgctgcatcaactgaaaaagaaatcaacggtaaattgatgaaactgtttaccgaagaaatcccagatttcgataacgaataccgtaaagcgttcgatgcgtattctgttgatggtttctttgcatcaccgcaggtgaatagcaaacacgaatatcatcgacgattctttgactggtcgatcgtcaatatcgttcgtcgaactgacatcgaacctacaaaccatcaattgatctctatggattcttctgtattctttatccagtaccttatcactggtggatttaaagcagaaggtatcccgttctgtaacgaagctctggaagaagagttcgcagaagcgtataagtatatcaaagcagttcgttaatcaacaggctatcttcggatagccttttttctggagaagcatatgcgctttttgaaatacgcaagctggcttgtactggttcccctggatattattacgggtgttcttgctattctgctggctcctttcgtggttccgttctacagtgaagaaaccggacacttacctaaagggttccgttggatggaaacattcgataacccgatcgatggtgatggtggacatatccggcgttgggctaacatccggtatcacttaggcgatctgggtgtgtatgcgcaacgtgtaggctggttgtggcgtaacaaagcgtacaacttcgcttatcacgtcttagggcgtgaagcacagtcagacttcgcctggaagggtaacccgaaaacagaaggtggttccgatccttcgcgtcacggttatctgttgatgtggaatgattcggcatgggggctttatgtcttcaaaccgtggcttaaagtcggaaaggttcagttctgcttacgcgtgtattgcgggtggaaactgaaacaggaagtaactgatcctaacgggctggatcgtgcaatgctggcgttccatatcaacccgttgcgttattatgtcgtagaaaggtaatacaatgaaagcatatcagattttagaaggtttacacactggcacaatctacctggaagaaggtaatgatgttcgtgtggtggtatccaaaaccctcgaaatggattcagtgatcggtaaagctcgcgttgctccattcgcaaaacgtgaagtcgatattgaatttcaacccactgttaaagtggaaggtggacaacacttaaacgtaaacgtgttgcgccgcgaaactctggaagatgctgtgaagcatccagaaaaatacccgcagttaacgatccgtgtttccggctatgcagtgcgtttcaattcactgactcctgaacaacagcgcgacgttatcgcccgaacctttacagagagtatataatggcgattgaagacgtacagggctataagccccactcgaaagaaaagatcgacaaagtaaaccgcatcaaggccgcagaagttgccctgggcgaaatcttcaaagaactggatgaagagtattcaagtgattacgcggtatcggataccgattcattcactaccgaagaactcgatgcgatgcttgaacgtgtccatcaaatccaactggcgaaagaccgactgaaagaagcctctatgtgggcgtgtcgcgcggtgttccagccagaagaaaagtattaaaaatcaagccgttgccgaaaggtagcggcttttttcgtttttatgcaaaataatgcttgcactgaatccgactttcttgtatctttaaccacgtaggcaagacaacttaactttgaggatgacattatgaaaacttacaacatgaaagaactggtttgcttcaacactcgtcgtgaagcccgtgcgtatgttctggctgctggtaaaaatacctctgctgtaatcgacctgggtactgataaagctgttggcgcacgttgggctgctgttgtggttatcgctgctcctgtgactcctgttaaaactctggttctgggtgcgcgtaaagccgaaactctgaaaaccagcacttgcaataacagaggtgttcataatgtcaccgtcatcaaaaaacgtagctttggtttgagggcttaacatgagttcaattaacacagaaaaagattttgtgatgtttgttggggtacagactgtaaagaaagatatcttcggtaaactgtatctgtcaaacgacgatcgcaacccagcatcattcgaaaccgaagatgatgcatatatcgcgaagaacaccagcgataacgaagacattcgccagtatgcgcggatctataaccgtgaagtaacaacccgtctggagagagcgtgatgcgtgaaggtatcgaagtaagaacgtttcagttcgaaatgcgtcgtatcccagaagcatcaatgaatctcattcgagaacacaacgtgaaaatcgtagaaattgatgcatacgcgggtactgatctttataatgatgcgaagattgacagcattgatttagaccttgagggtgatattggggatctgaataagctggctattgcattgaatgcagaaaccaacaaatacgggtatacaatcaaatgaaatatattctcgaatatcatgagcatcaaattaccgaagcaatgatcgataagatgcgggtatataaccaaaacattaccagcatcaaaccgctatcagtgtgtcgtgaatttgggggatactccttcgcgatgtacacaaattccgaagacgacgcaaccgcgtatctgaaaagtatcggtgcaatattcgacaaattcgaaaaagtatggaaggtaggtttctaatgaaaaagtattttattgaagcggcagatcgtatcgttcttgctctgttgaactggaaccgtcgccagaatgtctctatcatggcatcaaccaacgggacaacatatgaccgttatgatccggcgcgtggactccataagccttacgaggttaaagcgtgaagtattacggattcaaaacgagtcattacggtaaagcataccgcactgacaacatcgatcgcaaacgtccgtactatgattctctggtacgtgctggacgcaaacgcgctcgccaggaagggaagaaggaagctgaaaatgaaacagaatagtgaactggctttgattgcttttggttttgctctgggttgtatggtttctgcattactcgttaacttcgcggggtgattatgggttattacatccgatttcctcatggttatatatccagtagtgtttttgaaatgatcgaaacacacaaacagaaaatcaaaaatgtttccgtttctaccgatgacggtggcggatttgattacatcagtgctcactttgaaagcgaaagcaagggacttactgattatttccttcgtaagctgggtgctaagttgatcgacaaaaataataaagtgtatgaggttattcgataatggatatcggatcaggtagtcagtatccatcatgcgcattgagcaacttcgccccgcatccgtttacgtttgacggggtagaatgtgcatcaatggagggctttttacaaagtctgaaattcagcaatccagatatgcaagcgcatgtgtgtacgctggttggtaaagccgccaagttcaaaggcaagaaaaagaaatggtatcgcgatcagaccctatactggaagggtatgccgattcaccgtgaatcagaagcgtatcaaatcctgattgaaaacgcgtacaatgctcttttcctgaatgacgggttccgccgtgcgctggctgcaaccggaaaaagtaccttgactcattcaatgggaaagaataagatgaatgaaacggtactcactgaacgtgagtttgtccgaaatttaacccgattgagagatctgttatgaaagattatgatgaaagagtagaatgcgcgttcctgttcaaaggcgcgattaacccgctggcattactccacgcacagggtgctttgagttctaccctgattatgggtgttatctacaaagcgggtgtgtattacgttaccatcggcgcgaacaacattaacgtgatcaacagctacgttgaaaaatgtaagctgaaagatattgtgttcgataaagtcgaaatggatgttccaggcttcgacgctgtttatatgtacaagggttgataatgagttacgtaatttatttcgactgttcggatctcgatcctttcgttctgcaacaggcaaagaaatatcatcaagatgtcgttggcattggtgtaacaaacgatgatatgttgtgcatcgaatttgattactatcgtacattcgagcgtgatcaattcctcgctgatatacaagcgtttaaaagttcccttttcttcgaccgttatgaggttatatcttgaaaccagttattcttaccgacattgacgggatcgccgtaaaatggcaaagcggcctcccgttctttttgtctaaacacaacatgccgaccgatatcgcgctggatatggttacggatgaaaagttccgtgatatgactgaaatctttgggtgtgatcaccaactggctaaaatcctcatggaagaatacaataacagttcgtttattcgctatctaagcgcgtatgacgatgcgttaattgtgatcaaccgtctgaaagccaaatatgatttcgtggctgtcacggcgctgggaaccactcctacagcaagccttaaccgtattgcaaacctgaacacgctgttcccttctgcattcaaagaagtgatggttgtcgggcatggtgaaaccaaagtacaccgctacctggaagcgaaagccaaatatggcaatcgtctggtttgcttcgttgatgaccttgcggtaaacttaaacgaatgccataacgtcatcagtcagttgccgttattccatatgttgcgtggtgaacgtgaaaccccgtggtcgcctcaccagtcagttaaatcatggtttgaaatcgaagagaaattacatgatcttacagattctaaatgaactcgcttcgactctgaaaatttcagagaaggaagcgatcctgaaacgtaatgcaggtaatgatctgctaaaagagattttccgcattacgtacacgaaacagattatgtttcacattaagaagttcccgcaggtggacggtaagccaggcacaaccccgctatcgaatgctatcgcggatttgatgtctgatttggcaacgcgaaaatatacgggcaacgcagcccgtgatcgtctgctggatattgtatcatcagtgaacgagaatgatcgcgaagtgcttcgccgtatcattaaccgcgatctggaatgtggtgctggtacaacgttaccaaaccgcgtatggaagaaactcattccagaacagcctcaatgcctcgctacgccgtttagcgagaaagccttaaaacgtattcgcttccctgcttactcgcagcttaaagccgatggtgcgcgttgtatgtccgatctgttagagaaccagatccgcaaagcaacccgcgcggggaatgagtatgaaggtttggtgaatctggacaaggatctgaaaaagattcgtgaatatctgggttatgatgttgtacttgatggagaactgatttatgtccctgctgaaaaaactgctgtcgttccttcaaacagcgttccatttagtcttgctgggtttatgggcgatgacgacgattctgtttctgaccttgtggcagatgttaggcgggaagctaccgagaacgagacacaagcggaagcgaaacgcgaagagggcaacgggattgtaaacaaatccctgaaaggtactatcagcgacgaagaacagcgcaatatcgtttatgttgtctgggatatcgtaccgtatgaagtatactatggtgatgctccgagtgttcaaccatattgcgatcgtttctctatcctggaaggtgcgctggctggctctggtgtaacatcggttaagttgatcccttctatcctggtgcagaactatgcggaagcgaaaaaggattacaacaattaccgcaatgacggtaaagagggttcaatcctgaaaaacgttgatttcaaatggaaggattcacgcgttgcggatcaggtgaagttgaagaacaaaaccccgatcgaactgcgaatcatcgacgtgtacgaacacaccaaagaacctcataaggttggcgggtttgtggttgaggacttatcaggggaagccagaacgaacacaggttccggtctgactgatacggactaccgatacgatgaagacggtattaaccgcgtgtacatcccgttagaagaacgtggtgaactggatcgcgaatacattatggcgaacaaagatgactatatcggcgctatcgtcgaaatggaagttgacggactccagaaatcgaaaacgcgtaagaagggcgaacctgagttcagtttcttcctgccaatcatcaagaagattcgacgcgataagaccgaaccggatgacattcacgttatcttcgctgatctgttttaaatagcactttttgctaaagaagccccttgcatatgtgaggggctttttgtatattacacacatcgaaacgaaacagacaaaaggaacatcccatgaatatcaataaagaactcgaaggcaaagtaatcgttctggtaaatgaagaccgtttggcacaactgggtaacggtggtgaaaaactgccagcggacgcactcgaaagcctttctaaaatgcgtgtgatgcgtgttactgacggttgggttacttgtctgcctctgaacgacgaagacaaagccgtatacgatgcacaagcggattcatgggatatcgaagtacctctggtgaacatcgaagttgaagagtgctacgaaatcgaaaaataatgcttgcttcctgggtagtgtagtgatacattacccacatcgaaacaacacggaaagaggaaaagattatgtcaatggctcacttaactaagaaagcggattttctggctctgattgctggcatgaacgcaccgcgtttaactcgcaacaacattcaggtgtatgtgtttgacgagaagccaagcaataacgaagttcagttcccgactctgatctattgcgcttctaatttccgtgaagaaagctacatcgcagcacagaacaaattgtggaaattccgcgattggatgaacgaggcgaaaaatggttgatatgagtaaagaagccgttgaagcacgggttgcggaagcgctgaaagatattgatttcggtcgcttccttgataatgctccaacgataccggacacaatctgccttaattgtgggcgttgtgttatggttggaaaatgctgtgataacccgaatattgttatcatggaaaggaaagaagtttcggaagaagtctggaatcagattcaggaaatcattaagaatccaccagaaccgacgaagcgtttgcgtgaaatcatgagcaggaataaattatgaaatcagaaccaagtaaaactatccgcctgatccgttgggaagggcaagaaatccgttatgaagacgacgatcgcgaattcgttcatgaaatgcttgctcataatctggggttcaaaaacgccgcactggtgatgatgcagcaaaccagtgatgaagacacctggcaatgcgtcattctcgatctggacaaaaacaaggattacaccgaagatgaacttttcgcgctcacagagaacgctacagcgcgtcagaagtgcttcatgatcgatatgcctcgcgagaactacgagaatatcaagaaagcccgtaaacagaacaagaacaacgtgttcgacctgttcatgggctatcatgaagaaactacggcctaagcctcactggttttactggtgtcgttcgtagccgctgccacctgtacacattccaatgtttgcaggtggaaatcttttgatacatcgcggatacattcaacgatcagatacttccctgaatattcatcccctaacacctcaatcaatgcccccactttaacatccattcgaccctgattgatatcaaaccgaatacgtttttcataactggataacgtccgacacttcacagcctggaacggttgaccctgtttgtctgggttctggaagttgttctcatataccgcgttcctgttcatggtgatccatgcgttttcaatatcggtactcgcaaggatatcactgtacagctttttatccgtcatcgagaaactaaagaaacttgcatcccctaacagggtagtgttatccttatgggtaatgtattctgctttagtgaataccaaagcgtcacctaaaaacgggttacttacgttgaacttgtaagcctttaacggggtttgtgcgaggatctccgtattgcttttcataaagataccggaaccatcttcccacagataacagaagtcagacgaatctacgctctgcccgttgtcacggatgtaatcaaacacggtttcatacgtcccgctcaggcaagccggaggaatacgcacgtttgatgcgtcgataggtggtgtgatcaacttcatatcattatacagtgccgtcatgcactctgtaatcgtctgtacggcgttgttactgaacgaacgggaaaacttacgacgaaacaccgtatgcaccggagaaaggtttaggcgcagtatagagcggttcatatcatcggtttcgacgtttgaatacagaacaccgtagtaatgctgttctaacgtttcgttatactggaaggatacctgaataatcggtttctctgtcaactgatagattaactggttatcatagatctgcatcaatgtttcagaagtaccgttaatgatggttttctcactcattgagacaagggcaggtaacaattcaagatagacgttatcagcgaacttttcatatgttggatataatttaaccgacacgacgcggtttataactttactggacattagacatcctccctttatattctatttactaaatagtaaatatcgggatacttgaggcgatcatgaaagagaagaaaaacacacttgataaatttatggttacgcgtttaaacatcaagaacagcaaaaataaagtagtcacgttgcctactggtgaacaggttacgatcccccgtctgggctatcgtcatttcacccagattaaagcaatgaaagacccaatgcagttgcttgagtatatcatcaaagagattcaaccgcgcgaattaaccgcagcagaaaccgaattccttttgattcacctgcattatcataatgacgataaagcaatggcgatactgaaagagatcggtattaatctggatgatatgaaaatcagcgaagctaagtatgaacatacttttgataaccttcgattggtcttcaacaaaccgaccctaatgctggatgatctggcattactgcttaaagaagcgtatgacaacgggaagccgatcgaactgacggacgaaaaccgtattcaattaattaactgcctgtatcgttatgaatatgacgatgtaaaacgtggcgtactccaggaagtctatattgtgcatgaggggaaaaccattaaagggcttaacatcatcggtgaatgataatggctagcaatccatattttaacgaagaacaacgtcgtcggatgcagaatccaccaaaaccacaggcgcaaccaactgttcggaagatccaggcaacgttagataaagattcgatgcgcgagttaaaggatatcaatgataacacccttgaaaccgcgctgaatacactggacatcaaagacagtgtgaaatcctttgaggatcgtttcaaagagaaattcgctggcttccaggaacaatacgaacaggatcaacaaccacttgctgaacagttgcccgattttgttgggccagcgcgtccaccatcattaacagacaacagcacaaccagtgttgataactccgtcagtgtatcgaaccagcataacccatttgcgaaaatcgaaacatacaccggaacgattgcagaagcaatcaccaagtttatcgaactcgctgaaaagaaaccagcccccgcgccggaacctgaaccagtaccggaagaggaaccggaggtcgatcgggacaagaagaagatccgcgataaggataaagacgagaagaaattcagtaagcgcgttcttgcgttgctgggttcaatcaaggataatacatctggtcttctgtctcgctttatcggatactctctcgaagcgctggcgaagtttgccaaatggactttgattatcggtagtatcgtattcgctatcgacgttctgagcaaggttattcagaagtggttccaggatattctcgcagagggtgaagcctcgaaagagttatttggatcatacttcggaaatattaaagcccttgcagaaaaaatcaatgaagggctgcaaaacttcaatatgaaggatttgggcggatcattgaaaaacttgttcctcgaaccgtttaaaattctgggcgataccattaaaaccgcaatcacggaaggtatcggtaatctaatctatgctctgggcgaatataccggatcagaaacgattactaacgccggacgcgggatgaaggtatcagcgctacgcgataaacagaaatacggtcttgagattgataaagatgatttggttctgttgaaacagcaagagatccaggatcagaacgataaagttgttgaacagcgttctaagctcgtcgatcaggttaaggctacgcagggtacattctcatatagtttcgggcaacagacagaagcacagaaagcacaatccaagcatcttgaagaacttcgcaatcaggtagaactcgaagagaagatcaccgaagagaagaagaaagaactgaaagcattgcaggaaaaccctgcactgttacaggctgaggttgacaaagagaataccgcgaaccgtcaacgtgtagatgaaaccaaacagatcgaagcagcgcaagagaaagcgaaacctaaagcagataatgaattcgatcagggcgatgaaatcctgaacaaagacaatctgacgggcaacgataaaaaggtaatggaaaaactcatagaatcgcttgaagagaaaaacaattcgaacaagctgaatgaggacgataaagaccgatatcgtgatatgatctcccgctggcaggaaaaaatcaccgcagtaccggaaacgagtgcaagtattgacaagcaaccggaagcagtgaaagcgcctgttcagcctacaacgcctaacagcgttcaggtcaacaacaaaacagtaaacaacacggttcagcattcagtccaacgaactgaccgtaaaccattgattgcattagcttaaaggaaatttaaatgaaaattacagtattgcaagacactgtacaatcatttgctgaaatcaaaaatgctggcatcccctctgggggtgctgcaacaactaaaaacgcgttgactcaaccgatcgtaacagcggaatttccttcccaacgtgcagcaggtattgataacgcgtacaacgcatcaagcctttataataacggcttgctgtttacagcatatgatttcagtggtggacttgcaccaggaagcaaagataactatcgctcattgcgtcaggccgcacagaacgcgcaacagatccttagtgccaacactgggaacgttcgatacaaacaggttttgaatacccgtactatgggtacacttaacccaatttgtcaaatacttttaccgcgaagcctgaacgataacgaagtgaactcacaccgctatcaggacgcgaccgatagtattgttgctaaaggtctatcccgtgcagtatcaaacgttatctggggcgctgtagaatccgtttctggtggtattctggcagaccgtagggaagcaatcgacatcggtacgaaagcagcgtttcaaggctctgataagcgcacaaagatgtattacaatacattcgttatcgaaagccgttatgacctgctggaactgattaaaatctattacctgttcacggtgttgggttatggtactacttcgggtggtactccagcagaattagccggactggttaagcaagcgtataattccagcgcttcgaaggttgcaaacgtttttgcaccatcaacaaaccagacgacagcaagcgatttcaacggcagtatcggggatcagattgttgacttcgtatcgaacgttgaagttattaaatcgcctcctgtgtggtttattcgtgacttccagacaggtgacagtttacggttccctcattctacatttgggccagcaggtattaccagcgttcgtttcgggcgtacaatggacaacattgtaaatacgttgagagaatcaccgaacaccccgatcgcagttgaaatcgaaattcagtttatggaactgatcgatatgcgtcaggattcgatttttgatacgcagtattaagggggaacaatgttctatagcgtagatgaatttttgtcaggaatggcaaatagagactttcagcgaagcaacctgtttagtgttgtattcgcaaccagtccagcatcacgcattctcgacagcacgatcgggagtatccgcgatactttaattgatggtactatgagttccattaacgcgaataacccgaacgagttcatgaacgctattacagggggcgtaagcaagctattcagctatacggttgataaagctattatgtccctgaacaaaacaggtttcagtaaaatcatgggggcgttaagccctcgtttaattacttccctgtttggtgatagtgtttacggacagatgctaacagaattccgtgacaaaatgatgtacaatatggggttgagcatcgttggcgttcagttgcctggtaaaacactgggttatgaatacgtgtataatggcggtgtaccccagatccgattcacccgaccggagaatggtgaattatcgctaacgttccgtgtggattcagaagcgcgtaacctgaaagtattcaacgaatggttatcagctattcgtgatgatgtatcaggccagttcgcattcattgatgaagtatcaagcgcgatccaggtaaacttacacaatcgcgatggtgtcccgcacagcacgtatgtattccagaagtgtttgcctgttaaagtcagcaacccagaactgagttatgaaagcaataacgaaatctggacattcactgttgactttgcctataaaacaggctggcttgttgaagcagataaagaaggttgggacggattcaaacaatcacttatcgaaggcgcagcaattgccgttcgtggtgtggttacaggacaataaggggcgaaagccccttttgaggttaaaatgattgatataatccgcgtaaaactccctggtggagtgaagcgattccctatgtttaccgtgcgcgatcagttgagtttcttactcacaagcgcggacatggaagggaagacgctcacagaacagcaagaaatgctggatgaaattttagatattctgtatccgggttattcccgcaccgaacaggaaaacatattcactaaggtgtattgcgtatcgttcggtaagaacgcaatcaagatccgaatcaaaggaagcagcggacaatcagaagcattcatgcatgtaactgattacgttctgcaaaatgaatatgcccttgatgactcgcttactctgggattcaaattcccgaaacatcgtaacaacagtgaacaattattccttgaatgtatccagtatgtcaagcaggacggcgaaagatacgaatggaatgcattagacgaggatacaaagaacgcgatcctggatctggtgtctattgaagatatggaaaatatcgttaaactgttacgcaagtcctgtcatgttaccgtgcgtgatattgagttcagcgacttattgacactgtacaaaatcctattcaacaaatcagaactgaatgagttcttcaaaaccaactatttgttaaataagaataccgtacagattgaacctataatgaatggaagcccgatggaacgttcaatttacgttgcattgctggcggaagacttgaaacgaaaagagaatgcaaatgcgtaaacatacaccccgacatatcccaaaatataatgtgacttatcgcccgttaaccattggcgatcttgatgacacggataacttcattattgaaggtgatgtgttcagacatcagcgcgattatgtttacattatggctctgttcgacagtatcaacaaagagactgtagatctccaaatcaaatgccctgaatgtggggaactgattaagtttgtgctcaatcgtcatcatatcatggtggacgaatacgaagaaaagctgtacggcaatgagatcaagatttcagtcgaaccacaccgcaccggaaaggaagagttgcccgaactgattaagtttgtagtcatcgacggtgaacaaatcttatgggatgactgtaaagagtcagagaaagaagccgttctggatagtatcgactatccggtctttaaatcaataaatagcgctctggataagccagcaatcgttgcaaacattccggtaaggtgttcgtgtggctacgaacatatcgttgcactgagaggcttagaggcgtttctaaaggtggttggataaaatgggtgttaaccttcgcttactgtatagcgatatcgatcccaacttaacaaaagactggaacaatgacgtaaccgcctcgaaaggggcggcagcggtaaagaatagtctgatcggtatcgtaacaacacaaaaaggcacacggcctttcgatagcaactttggttgtgagatcggggaacagattttcgagaacatgaacccgctaacagcggaagcagtaaggacttcgattgtctccgcgatccgcgcatacgaaccccgtgtttacaatctggatgttgaagtgattccgcagtatgacgagaacgcgatcaccgtaacgatttactacagcatcattgatgaaccggaagaaatagaaagaatcaaactccagctatcatcctcataacaaaaaagccccgaaaggggcttttcttattccatcacgatccagcccattagctgttgatatcgcaattcgaacggagtgatgaaagagcggttattgacaaccttcgtcccgttataggacttaatcacttcctcaccacgaagcacatattcgtatacttcatccatcgtatcataacgcacttcttcgacttcgaagcagaagttggaatattcaatcatcccgatcttgttcgcgtaacgacgttcgatacaaccctgtttttcaatctgagtaatcgcagtatcaatgaactgcgcaagtgcttgcatgaaattactacattcgacttcacggcctccgcttgagatagccaggtaaacgcggctcaatccatcattgccgatgtaaccgatacagtcaccgccaatatagacagaccagactttacccatcggccccatacccatacgattctcactacgagaaacacctttcagtaacagtgccatgataccgccgcgaacgtaattcattttcatgataagccccttattttttcaggttgattaaccaagatggttgggtttctaaactaaccgctttccaagcatatgcaacactataaccggaatacgtctgacatacaacagcattttcatttaaatatttcactttgtgatctgcctcttgttcattcagggcagcacacacgatattcttttcatacactccgccgtttggctggataatggtttcttcaatcagataaacgctgttcatgctaattccttctcgattgcttcgatgatgtggagaacgtaaccgttcagttcttttgctttatcagcggcttcaaccataccgtaacgaggaacttctaaaacgttcgcaccttcgagcaggttgctttcgatgtctacgattacgtagctctcaccgattgtcgcgccttttctccagtcttttacgaacttcatcattttagctttcatgttctcgttccttttggctgttccgtttcgatatgtgtaatataacaaagccctcacgcgaacgcaagggctttttgggttaactgaatttattatagagagtgaaattaatccctatagaattcaatgctttacatgttgcatcaagatctgttggttcgatttcgatgatgtatttcaacgctgtgtttactggaatggtttctggttcttcgaaagatgccagggttggcgctttcaccgtttctggttcagcaagcgcggttttctttacgtcaaacgcttctttgaacttgttgaccctttttagcaggtcatcaatcaattcgatgttagctccgtcgaattgtctggtttgttccagcatactcgtaatctttccgtatgtagtgcgtctggtttgttccgtgtaattcccgacttcataacggtcgatccggtcgatgattgcccgaatatgtccaagattcgcgcgatcgaaatacgcaatcaacttagattttctgaacacgaacatatatggagcattaccgacaatgtaatgagttgccgttagaccaaaactaggatcgatcagaattttaaccgtgttgaaatacgggattaaatttatttcacgttcaggtaaacggaaaacttcatctttaaagttcttcccaatccggtcgatctcttccagagttttacccatcatcgacgaaattatttcaatttttttagatacataagccatttttcaattctcatttaattaatgcataaaagatttgacgtacttcacgatttcttcacgacacatatcgaccggagtatcctcagcaatagcagcatgacagaagatttcaccatccagccagaacgatagcatgtactgaatatcccgaccttcgttttctttctggtgtttcttgatgcgatcaaatgcatcatccatgctttcggtagctgtaagtatttcagattcacccgctacagcagccatttccccagcttcatcactgaattcgctttccagttcttcccagtatactatcgttatcatggattaccccaaacagattttacatttacagagaggacattccgcctctttaacgcgcaagcgctttgttgctgttcgcttcgctgtgttgtgatcatacacatgcaaacagcgataacagatcaccaatcgtttagccgtcataaccaccaccgcaacgaacatcaccttcaatgaacatttcgcggttatctctcaggagattgtatttcttttcgagttccggcccgaatgcgtccgcgtcgtcataccagtcatagttataacttccggtttcatcgtcgtattccggttcgccgccgcgctcattgaagtgaacgattttaacatcatccagattcagttctttcaacttgtcccagatgcgggttatttctacgctattacatccgaacgcttccagtgtgattgtgccgtcatcgtgtatttgaggtaaatcccagcgaggacgagtatcatcaaacatatccatcagagattcaacgtttgactcaccgtaaatctttgcaacttcctgttctttaccagggcggacaagtcctatcccgataatgaaactactgcttgagctattgctcacgaacccagaacgaatcttcatcgtcttgcctcatatttcgcgttctccgcgattttctcatgatacaggttgtatgacaacaccagcgggatacttgccacgataaggccaatgacaaccatttgatattcgcgcttatcgaacgccatgaatgaaatcgcagcgcccagaataaacacacccaatgcaatgataaagaatagagtcattttgacagggtatccatgcagcgtgatttttctttcaggatggtgatcacagtttccatcgcctgttgtacatcaccgtcaaagtgaatcaggaatgttttgtgtagtcccatgatcagacggttgacaatgtaagccatttctgacggcaacagtttaccatcttgatgattgtacttctcaaacaggcggtagagttctgcgctgttgcctggcttctcgatgctgaaattatgcattccagacagaagaccatccagatacagaacagttttgttatcactgcgcaggtgtccgccgaccttgtagtagttgctgaatacatacgggttttcgcggatatcttcgataccgaattcaccatgatctccgatattgccaacatgggcgaagaaattatggtcttccagttcgagaaggattgcaccctttttgtaagggaacccgactaaatcgatctgccagccattttcaccgacaaatacatcatcaacaaccacgaaatccggcagcataggcgcgtatgcgtggttcttttcgttgttttcacgataggcttgtggttcggacaggtacaggatatcgccttttacaacttcaccccagaatacgttacgtgacatagtattttcctcaatatgccccctttcgggggcggacattgttagattttgacttctttttcttccaggacaatttcacattcgaatgatgtggtttcccagactttccagaaatcggacggaatattatcttctttcggaagaatatctttcgcagcgatagaaactttggtttcttcgaagtccagatccgcgaaccatgcatgtgctactacaacaccgtacattacgcgacttaaacgggcattcagtttacggacttcctgaatcgttgcctttgtctgcttatcaagatactcgactacctgatctttgtcaagcgcatccagttcagatttcacctgatcgtaagcccacaggataatcaggtcgccgttgttcagtttcttcttaccttcttcacgcttcgcgacggtagccgctacagcaggaagggaggaaacacccttgattttcacgttcagttctttcgacatgtaaacatcagtcgattctgtgcgctcaaccttcggagagaacccgtaatcacgaataccctgttcagacagccattcacccgcagcttcaccaaagcgctgtttcagcccttctgcgttgcgcagtccgatcgcgttgtcacggaagaacttcataaccttctgacggcctttcaggatttccaggcgcacgttatcagtcacgaactctttaccgcttaacccgcgagtcatgccacggttaaccagaggcagagaggtaaagtctaccagaacagacatacgatcatcaccgattttttcgagcggcttgatagtcaggccagaagcacgaaggtttttcagtgtcggaatatcggtttccagcggcagaactttaacgttcacgataccatctttaacgatggtgaagttacgcacctgcttagtttcgattttttccggcagaccgaattctttctgtttgctttctgggatagtcacatacccttccagatccgtgttgatggaaatgttaggacgggaactgttacccaccagatgtttaaccgatactttggttgtggtttgggtaaatttcggtgtccagacttcatgcgctaccatttgcgccgccagtgctttacgttcttctggggttgcagcgtttgcgatctgttcggtcagttgatccagtgtatcatcttctttctgtacagtctgacggcctgtgcggttatacgcccagtgctcagaagacaggtcgatcactgtgtcagtttgtgccagcagttcgagcgcatcaaccagagtaaacgcgttttcgtctggaaccatgttgtaatcaataccatcaacgaaacgctgtgatggatctacaacagcctgtgcaatcaggtctttcgcgttggagtagtcctgtttggtaaagcagttgtcatacgctttgatcagacggacatcacccagcttttgaagcactttccatgccagatcagggttcattgtgtgcagtgcatgataaagcacgacatacagaacttgctgttcgctggcgatgttcggatcgaatccgtcaacatcattaatcgcgttttcacccagcgcccagatgtttttgatgtgttctggaaccagcacaacaccgtttgcagcgttcaggacatacacgcgcccttcgtccaggtagatcgcatgggtagcatcagcaactttgacttcgatacgtgcggaagtttgcgcagtgatgatttcggcaaatgctggttcgtatgcgtcgaaaccttcaacgaatttgtgtaatgcgttggttgcttctgccattttttccagcagaggacgattcacgtaataaccgtattccaggaacgcgatactgttgaaagtcagtggcagaaccgcacacgctttcaggatgtcatcggtacgccagcagttatcataaccgtctgtcaggaagatcaggctgttcaggttgccgttttcggattgcagatcggtagcgatttccgcagccagattcaacggctcaacgaagccagtacaaccagtaggtttcaggtaacggtcgatagccgcgcagatgttagacaggtcagagacattgctaaccttctcaccacggaacaccgtgccgtaatcgcctttgctggagaagtacaggatcgaaacggtgtcatcctgtttaaccagactcgccagatttgcttttaggtgtttacggatcttaggcagttcgttatacattgaaccggatacgtcacacacgaaaacgtggtttgtcggggttggcttcgatacagcgtttttgaattcgatatttgttattgacatttaaattttctcgtatttgaatttttctaaaatttcgttaactttattgcttactgcttcgactgtacgatcacacccgaacttacgcgccaggagttcaacgtattcatccatcgtagtgagtttggattctgcaatgtcaaacgcaagcgcatacattaccggattccatacccgaacgatttggagagtatactcgttcagttcaaaacgttcaagatattttcgcaaagaaaatacatcaaacggtgcggggcgatcctggctaaaggggatcgaatcccctaatgcatagcgaggcataacaacacagacttcggtttttaacttatccatcagtgatgactctttgatgtgtgttcaaggttacggaagatgtttccatgttccagttgagttccgatcgggccgcattcatcggagtacgtgaattcatagataaacacgccgtcctgattgccatacttcgtgttgtactcttcatacaaccacattttgatcagagcgtctttctcttctgtgtccagatcgtaccagtctcgcccgtcatacgcaagcgcaatttgagggtttgaacggtagcgggtttctgcgctttcttcggtttcccagtcatagcgtttatcgtcgtagaacgattcaaagctattacccagatgaccgcctaagtcacggtgaacatgattgaccacttcttccgctgttaacggaggattgtagtaaccgcagttcggaacgcaatcacccatcatttcgcgcaggttgtcgatattagtcggatctttcgggaaccggacgatgaaactacttgatgaactgttgctcacaaaaccagaacggattttcattttacatcctcaaattgtaagttttctttggttgcgttcgcaatggctttttcgttgctcagtgttactatgcgcagacgttctccagtaaagccgtcgcattcagtgatacttacccagtcaaaaggtttagccatttcaatcgcacgttccagcgatacggtagaaccgaccaaatcactaaatgtatagtaatcttcgcttaaactttcaacagtataaattttcacgatactttaccttttgtttcagatttcaggacgatgttactgtaagggtcttttgctaccagttcccacaggtcgccagggtgttccccgctacggtagacggatgaacgaatgatttcgttaaacttgctcagggcttcgtcgatgtcgtcatacccgcgtttgaggggcttacgattgcgacggatgaagaacatttctttggtcttctcccagcgttcggcgtttttaaccttcataccgcctccattttaccaatgacttcttcgtatgtcacagggttaggttcatagccgttagcgcctattgtatcgcctactctgtttcctactaaagaagcaaccgcaactttcttaccgtctttccacgcagtgaaatgcagattatccgcaacatacgggaaggtttcgtgattgttcaccgcgtcgatgcagtccataacggtatcagacgcgcagatcagattaccaggttcataatcaaccaaacattcaacagtgtaaatcataataatttcctcacgaaaaagcccctttcggggcttgattaatcagtgtccgaacacaccacgaatagactctgcgaacgcgtacagttcagggtttttcgctttcactgtttcgatttgttccaggatgtaatctggtttgtatttcgcaccgaaccagcagtaagagaaagaacgatcccacatgaacacgttgtagtattcaccgttacgcacttcaaccatcacgtaacctggattagaacccagcgggtaatctttcagtagattgaatttcgcaccagcgccagtacatccgttaaacaggtcattaaaagtcatggtatgttccttttcagtttcgtttcgttaaagctaagataccactatcaactactggatacaaacacttttttgaagaattttgtttccggtctttctttgtacggacgcattaccaaatctttaccgtccagcacggttggcttaccttcgagttcgatcaggatgaagtttcctttatgatacttcaatacgccctggctggcagaccattcatcattatcccagtggttgtaatgccattcaacaacggtatcgatcgggatttctggttgatttctcataatactttcctaatttgtttcgctatggcttcaatcacgggtattgaaactgaatttcccgcttgacgatatgcctgttttttactatccggtatgataaatgaatctgggaacccttgcaaacgaaaacactcacggggagtaagtcttctggggttctttccttcctgcaacaccagacattgaacgccgtccttgtaatactgctgggtgatagtcccagtgtgcgtagaatcgcttgtgacggcctgataaccgaaacccttaccgtttgccttatttcgttccttacgctctctaaagcccttccatgcgttatctgacagggtgaacgaatcatcagcattttcgaggatgtcgcctactcgtgtaggggtgcgcgggggaaccggaaacgaaaagaatacatcatccaggaagcagacaataaacacgcgttcccgtctttgtggtagtccgaaatcctttgtgttcaggcgttgatagaatacgttgtatccttcggcctccagaagcccgtaaatcgttctgaacgtctttcccttgtcatgggttagtagctcaggcacgttctcaaagaacaatacacggggctttttagcgcgtataatgcggaggatttcaaagaacaccgtaccgcgcacatcgtcaaagcccagtttcaatccggctttactgaacgcctgacacgggaaccccgccagcaggatatcatgatccggcactttgttttcatcaatggcgaatagatcaccctgtaggttatcatcgccccagttttcgatatatgtttgctgtgcgaacttgtcgatttcagacgttaaaaggcattcgacaccgccgaacgccttatcaaatcctaatcgaaccccgcccacaccagcacagaggtcaattattttcatacgtcaaaatcaatctcgtcaattttgtatgagttttcgtcaatgtccgcccatagggttacattaacgtgtttgctatcttcgtacaactggcgaccaacaattccgcccgtgtaattgctttcggtgcgttcagtaacttccaggcggaggctatcgcgcatgatctgaacaacagcctgttccagtgtaaccgcgtctgggtttttggtatcgcccagtacaacatctttaactttcaaaataacatcagtcattagtaaaacttcccgtaggtgttgaaatttacgtgtgttgggctttcttcgttgatactgatttcataatcgtaatcctcatttgttacagaacgatcatgtttgataacatcaacgacatatacccgaaagaatgcatgatacagagcatcgcggatcttttcagcaagcaccggaggctcactgtacaggttaatcatatcggaaacaatatcctctacgcgaggaatatcacgtttctcgatgtaacccacatacagatttacatctttaaccattagtgccactccgttttaataccatgtcggtatgcgtcaatccccagtggggtaatcagcaaccatgctttcgaattatcgtgataacccgttacccttcgagcgtaacctttttgaatcagggcatcacgccctgatttgctgggtacgtcatcgaaatctaagtctagcaccttagttgcatatccgtaaagtttatacagaacatcaatttcagcgccggataatttaggatacatcatttgtaataccccacaacatgatcacggtatacgcgttcgatgaaatcgttccagaattcgcgatcaacttctttcggatatgttgaaatcgctgcaaggcgttcgacttcacccatgacttcttccagcttttcctgtaccgttgtgaacggtacgccgccagatttaaccagtttcaggaatgcgctatcaggcagaggataaacgatatcaccatctttgtaaatctggatcaactgcataccaccgcgcaacgcgtgacttaatgctttccagtcgatcccgttgttggcttctgcttgtcgtgcgcgttctccgtattcatcccagagtttatacacagacttacgcatttcatcggctttgatcgtgaactggaatttacgccccagcacttcatagaagtcctgacaaccagatttcattgtcgtgtcggtaacgaatcggcagaactcgtttgtagggaaacgatccttgatgtcagacactttcacttcacgcgtatagcgtttcatatctggcgtgaattcctgaataccaccgatcgtttcggtttctttcagtacatcgacaacttcgcgcagtgcagccagtcgggaacccttcacgccatatttcgcggcttgcttacgaacataaccgaacaggccagttagttcagtggtgtaaaaacgccagcggttagcgcggatatattgccagatttcagagttagcgatcagcttgtcatccgaagcgtgaagcatatctagcgctacggtatcaccatcacacgcaaggctaatgaacttagtcaagctatacagttgacgatccacgtcatccacggtgtttttagagcttttatcgcccgtgcttgtgtcgatagtctttggggctttccccaggagaatatcgcgcgggtgtgggaggaagatccctttatagtctttgtcgcttgtcggtgtgttcagtccgtacaggtgagaaccgaacacggtttccattacagttttcaaaattcaacccccagggtttttgcgataccgcgcagttcagcggtagtgatttcaggaacaacaacagagtgagaaccaaactcttttctgatcttttcacacagttcagcacgatacaggatttcgttgtataccgcttcgctgcgatacaaataaaatccaccccagccccctccagtaccagcagtcaatccagtcttacgatctactttctcgacgttccaatctttcaggccagcatctttatctgttgatgcgtacagatattgacgagcaaccttgagaacatgaaattcgcgaggatgctgatttgtatgatggttgtatcgacttataccaggatcgtaaagggtatcgcccactttcacatcagttaaatctttcggattcatttcattttccaacattttgacttttcacagtagaacaccggaagacgtgccagaactggcttcactacgtcttcccctgtgttcgtgttatgaactacttcgattgtaagggattgcccttcggacggccttacaatgtccagttccaggatctcacgattaccttttgtattgatttccgctacgtagtaatcgtgaccgttgatgtttacgacatcacccataataacgctaattgtgtgagtcatgagtatgcaaacttaattttaatattcagggaatccagcaggatcgcgtcacgtccatcaatgacggtcaatcccatgtatttgttatcgtctgtgctcttacgggagtacatgcgacaaaccagagaaccatcttgtgcgatgtattcaacgtggtattcgcggcgttctgacgtgaagatgtctccagcaacaaccggacgatcgacgggttggcgtttagtcccttcgaaggacagtttaccgttaccgtctacggcgcattcaatacctttatgcgcgatgctcgcaacagtaacaggctctacagttccaccgatcagcattgcgggttcttttgttcccagtttcatcaccagcgtttggcggatattatttgacattggttcagtaacaaacacataaaccatatcatttttatcacgcgcaactgattgcaaggtgtaattctttgtacctacagaacccgtgtgtttaattcctacacgatgtccaggttccagcgccatacgacattttacatcagagataccgcgctaagggttgccactttcatgatttattcctctcaaattcatcatcatcagatttccagtacacgttgaagttacggcaatcgtggtcggaagtcaacgtatatttttcttttgttttctcgtcggtgatcaccatcgtttcattctcgatcgagtccacaccatagacgaatactttatcaccgcgtttattcaggaacgcttcacctgtttcaaccaactgccagcagttgacgggtaaaccacccgcacagatcggacggtttacgaggcagtaaggacgtttaatcatttaaattcttccattgcataggaagtaagatctttgaaataccttgcggtgttgccttctgggttgtttgtaatctccatcaggataacagcaccatcaactcctgctttcttagccatgaatgaaatggcttcggtagcaataatcgttgctttcataacatcagctttagaaacgttgatcgtattcatttttcttccttttcattattcatgcggtatgtgtatataatacaaaagccctcacgcgaacgcaagggcttttttaatcttttatcagagtcccgtgaaagctacaacgatttgatagtggtcatcgaagaattccccttgtcgttgcacgacctcatgtaagggcatccagaacgcgtctaacgcatcgtcagaaccgcccataatgcggggcagactaccatcattgttaggctctaacttgatgtactgcgccacagtcggttttgagaagtgtacggaacgcttcggatgatcgaacaacatcgaattgcggattgaaccacggataaccttttcaggaactttgatccgcacctcttcgagcagttcgcggatcgcacaatccaggaacgtttcatttgcgtttttgtgtccgccgggaagggctaacgcgtctttacctggggcgaacttacgacgaattaccagcaggtgattgttgcacacaaccacactatcacccgtgcaacagtttagcgcgtcggggtatgggtagtttttgaatttctccaattcgctttcccatttctcgtattcgtagaataaacgccagaacgtgtcttccatcatccatttgtcgatataatcaacggttgcttgaggaacaaagcgcaacagtttcttatcccacccgtttttatggttaaagataatcggacgaagatcggttgctgatagatccttgccgttaatctggacaggtggaactggtacgtgtgtccatccgaacgctttaagccagtatgaacctgcatctttttcgtaaccgtagatagcgattttgtcgcctttggtttccctgatagcagtacgaacagaggttttccatttctcttcgttgtaaagataatctggaatgttctcaaactgaacacgaacaacatcttcgatcgggaagttagcgttaagccatgagaagatcatggtttgacgctcacgcgccgtcagcgggtttaaaacgttagggtaagcatatgctgaacccagaaggatgtaaacgatctttgcttctccgagtgctttacgcaccattgctgcatgaccattatggaagggttggaatctgccaattacgacagctttatcaaattgtttcataacgtgctccacgtttaaaggttaatcataaaacagacgcaatcaccaatacaccaagaaaaccgccaataaagccgaagaatagcgaaatgaagatagtaaggatgatctgttttatgttcattatagtattctcgttttaggagtcaagcccccaagagcgggggctttaaaaccttatttacgagaatcgaaaatcactttaccagcgtaatcagaacccatgacagtttgaggtacaccgccctgatatttgtccgcgatggtctgctgaacatcaagttctttccagcggatcatttctggggtgattgtgcgttgcagaatggcgttcgcttcggcttctttcttagccgcatacagacgggcatcagcatcacgctcgttagcctgtgcagcattgctacgggcttctttgtcggcaattgcctgaacaactgcctgttgagcgatttgctctttacgtgccagttctgctttttctgcgttcacctgttcttcacgaattttcgtgttttcaacctgtttcttaatcgcttccggcaggtcgatgtcctgcaagaatacctgtttcactgtgtaaccgtaaggacgggcatactcttcaacttcctgctgaattgcgatctgtagctggctttgaacttctgcattatacagatcctgtgctttcggtacagatttaccgaactcacggacagttgacagaagtttttcagtcacatatttatccagcgcctgatcctgactacccgcattgatacggttgatcggggctttgctaccatcgaactgtaacatcacggtcatatccacagtggatttgaatttatcctgggacggaacctgcaatttgtcaaacttcattgcgatgtctttggtgttgaacacctcgaaatcagccagtggatttaccaggtggaaaccaggcagaacaggcttcggtgaaactttacccatgaaggtttgagtttttaccgtaccatcctgaacgatagtgtacgagttcggaaccagccacagagcggcgattacgcccagagcgatcagagtggttttcttcgggttgtttacgatagtgtttaagttcatcattatttccattgggtttatgtttcaattcgatagttattctatcatcactttttcgcttgtcaaactctttttaagaaagttttgtcagcttgtaaatcgtttgatagcacaagcctttgatctcgtccaggacgttcttcaatgaactatctactgaatcatagatttcgttggcttcatcggctattttacggagatacgcgaccgtgtcaagcacattttctgtttttaatacgggtttgtatcgaccagtaatgcctatatggatttcggtgaatttatcaaccaaatcctgcatatcttcgtaaaacccttcaaatgctttatgctgtgaatatgaaccagtcgcaaagtgtgcgctgtgcatataggttacagacattaagcaagtgccaataaaggcatcaattttactcgcggtatcgcgttctgttacttcgttaaacgtctgcatcttcatcccttatgaacgatgaatagcggcgaattcacttgcaacccgtagccctaaacgtttacattcgggttcggatttacattgcttctgctgccattttcgttccatgtaattatagaatagttcactggtatttacgctgggagggatggtgtcaagatatacctgtagcgccgcattgatatagtaatcgaactctttggcgactactgacctatcatcagcatgtgatgacggagacaagattaacaaaccaaacatcagcgctttagatatgcgtttaatgttcataagcaattctctacgtgcttacggatcaacaatagatccgttcctgtatatatttatagcaaaaaaggggcgattcgccccttatgtaaaattagtctaaaaatacatcaagttatctcataccagcataagctacgctcaaaagcgcggatcttatttgcgttctcgatattttcatcccatccaattacgccagctttcatccggcgtaattcctgacgcattttagcgcgtactttcgaatcaatctttttcacagcgattgaaagcatcgcggagatatcacgatgagctttgttaccgtcgcgattcaggtttttatcgaaccggatatatgcgcaacctgatttgtgtttccagttggttgtataccaacgtaaaccatcaggactttccccgtgctgtgcataatactctgaaaatgcttttgtctcttcgatctgttcgatggaggacttatcacggactggaacatatttcttacggtaagtacggctcatagtgttctcctttgtttgtctgaatacaccttaacagttcagaccaacattatcaagaagtttttcgtgataatgtttgcgacagagcgaaacgtatttgtcttcggctccgatctcaacctgcgccccttcggttacgaagttgccttgtgcgtcgatacgtgcaaccgtagttgctttgcgtccacagtgacacattccgcgcagttctcggatctcgtctgaccaggccagcaaccagtaagaaccctcgaacagattcaactggaaatcagtacgcagaccgtaagccattacagggatttcgagttcatcaacaacacgacacagatcgaaaacgtttttcttcgaaaggaattgcgcctcgtcaacgaagatacaagcaattttattccggcgctggatgtcccagaacagatccatatcaggcgcaatcaattcacacttttcgttcagcccgatacgcgaactcactgtgtttgatgtgcgggtgtcgatcgctggcttatagattacaactcgcataccgcgctctttgtaattgtgcgcgtccgtcaatagtcgcgcacttttgccagcgttcatggatgcatagtgataatacaatttagccattgacacgctccacaaacttaatatgattctggaatttgccctcaccttcatggtttttgcatgttttgtttgaacagtatatccaccaatcccactcgtcgtaagggggtttgtcaatgttcatgacgcaaatcaaaggaaaatgacaatcccgacaacgaactttttctataatgtgtgcgttagccaattgaaaaccatcctttacccatgagtttttcattatgtcgcgcaagatgctctttgatttccggtatctggatagcaatatcatactcttctttcgtcatagtatgatttgcgcaacccatacacccgcacacctgcgcgttacaccaacggagtgttccgtatgtcgcaatcaccttcattgctttagctttgattttgtcagtcatgattagctcgctccaccgctaccgcatcacgaacagcatcggtgatttcattttcaacgaaatccaggatatccgctgtaatatcgtcgatacaggattgattgtagttacgtgaatcaggatcatcatcttcggcataatcctgatacgcttcgcccagttgtttcagcttgtgttttaacagcttttgttcttgcggtctcatgataaatccgccttatgtggatcaaccgatggatcgaagtgaacaacgatgattggataatcacccgtacactcgtcgataatggcgctaatacgcaaccaatcgccaccagcaagccccgcaccgataagaggggtaatgataggcaatttttcaggaaacgcactggcgcgttctacggcgctcacaaagcatgatcggattgcgtcataatccacttgcgggccagtaccccagaatttaaactgagtgtaggcattgaagacaatctgaccttcttccgtcatgtagatggagttagtgcctaacttacgctggtctcctttcatcgtcaatgcatcaattttgaacgcaccagggattttgtgcttcacttctttagcaatacccgcacccatgttgcaataacagttacacccatgaatcaagtgtacttttcgtttcaggaacaactctacagcgttccctttgatttctttaataatcattttcatcacctgtatagtggcggtaagccagcacagccagccccgcgatcacaacaataacacacattaagatataacctgtgttcatttaaattggtcatcccatctttgccacgcttccaactcgtcatcatatacagggaacgagctttcgtttggctttttaacgtaataccagataatgattgcagcagcaatcacacacccataaaagatcactaatcccaacatcagtataatcctataccagcgttatattcttcaaccaggtaagtacggagtttttcacaacgttccttatttggcgctttggtgcagaggttcatcatcggttcagactgcaaaaactcacgctgtttaaccagcttctgacgcttgaagaggtgcgcattttcttcgccccatacataagccgcgtccagttgttcagcgattacctgttcacataccgcaacgtctttaatgtcacgattattgcagagttcagccagtcgatcatcagcatgagcaaagccagcaaacagagtgagtaacagcgcaagttttttcatcgttttaccttagtatgaatcgttttcgataggggtataataatgggtttcgcagacataagcaagcactgatcgcaaactatcgctttcaaattctggcttttgattgagttccagactccagccagtgaagcacatccagcgttcttctgcaacgtcaaaggctaaccaatacatgttgaactgtgaacatgtatgttcgaagatgtcgaatagtagtttaccgccgatcggtttcacatatggtttcacgcgttgaagcgatttcaggactgtttcgaggttactgcgatcctcattcatcgcgatacgaagaatatgctgattggtttctgggttgtatccatcaatccccaaccccatatcctggaagaacttagtcgcatcatggaaaatctctcgtccgctgttcggggaattgatgtaaaacttaatgcgttgttttggagtcatcgcgcggacacgggaagcggttttgtgatcgatctcttctttgatgtctttgcgagcgttcagaagtttattcagcttttcctggtaaggtttcattaccgccctgatctcgtcgatacgttcatcaacgatcgctaactgctgttccggtgtcagtttagtttccatgttaagcccctacgcgcacaaagcgatcttcaattgcatcattaacacattcgtaaatgctaacgtcattcgggacgtgcttacgaatacccactttcacgatatccatgatctctttgttgctgccccacacgttcaggttgaagtaaacaccgccgctatgaattgtgctgttgccaacatcaagatacgtatcttgactttcgcagataaacagtttgcgtttttcttctccgtatgcgaagtagatactgaacgattacatacgatgacgatcgaccgtgatggtttccactttaacctttggatctttgttcagttcatctaacacaccctgaatgatgtgtagcatgttcggcttgatgatagtcgggtgactggtaataactcgatgtgatgtgctcataatttaatcctcaatagttggtacacacataataaaaaagcccctgcgaaattgcaagggctttttatcagataatgcgtttttcttctaacagcttcgcggtatggttaaccatgcgagcataatcacgggcttctttctttgaatacttgaaccccgcgttgtaactcgccagcgcctttttcaagtcgcctttgtggtaatcaagccagtattccagttcgtgaagtgcgtacttggaaccaccccgaagggtttcgagcttattgattactacgcgtttggaatatgatttatccattcgtgcggacgcgctacgggctgttacttgaaaacaaccataagcatgatgattctttttgcctttccctacgttctcacatgcgcgagactcgatccaggcaatagccgctaaatgatatcccaaacgtttcgatgtttccgattcaactggctttgcagttttgagatcgtattcgttaccgatcctgaaagcgtactccaaaacctttttctgttttggtgtaatatcatccaattccttaacatagctgggggcattggctggcgctttcttcattactgttgcttgttgtagcggtaaagttgacttcacagaagggagtgtttggataaactctcctaacggatcagtcgccgcgttgccagaaaaagagcataagaaaatgctggcagcaaagataattttcttcattgtaatacctatttgtaacaagagagggctatgataccctcgtcttattatttatgcaacgattttacgctgttttgcttcggtcagctttttctcgatgaattcagcaatgttatagtttgaaattgacgcaatcggatcgtacagcgctatgatttcatcaaacgatacccgaaccacatgtttaaagtgaacgctccagctagtcgtaaagatttcgctgttgttgaacccacaatcagggctgaacatggcgcgatattcgtaccctgtgtattctttcaaacggtttgcgctgtgcgcgttgctggtgatcaggaatttcccctggtgagtctcaaccacaaagaaatagcccagacgttctttattgtccagcatcgtttcaaacttacgattattttcttcgcgatcaacacgggtttcgatcatcttccagacctgttcatattcaggccaatcatgctcgacaacaaccgcttccaggggttctttgtgttgctcttttcggtagcgctcaactttacttagcaccgcagagagaagcagtttatcgctatcacttaacgcggaatcaatatccgcatgtttcatcacgacataacgttcttcacgtttcatactactacatccttatcacagaccggacaccgaatcacacgatacacatcacgaccgccagtgtaatcagttgataccttttctttgacatcctgcgcagtgtatgacagaacagcaccacaacgacaggcagtttgttttggggtaatgcttacaacttgaaccataataacctcacaagaatagtttcacttcgctaccgcatttcgggcagacgatatgttttttcacgatgtaatcagcagcacggaagaaaccgttgtagaacacttcgtttttcttctgtacatcagacagttcatactctaacccacttttgcaattagcgcaaacggtaattagctttggactgataataacgttgatcatgtatacctcacgaaaaaggggccgaagcccccttgatcaaaaattgtcttcaacaaaagctgcaagtcgcccacgatatacggtatccaggatcacatgacttgaatgaccgtactctttaagtttttcaaccgcatacacaaagccgttgttaacagcagtgttgcgcgggttgtcaatctgtttaatgttcccgcatagtatcagaagggtgttctcaccgcaacgggaaataatggatttgatttcgtgattgctcaagttttgacattcatcaacaatcagaaccgaacctttacccggatcaggatgcccgattgaacgcccacggaagtaatacaggctagggaactgcaccacacctttttccagaagtccttcaacgtacttgtcaacttccggttgatccttaaacagaatgttcaggctcgtgatacaaggctcaacagacggtcggagtttttcgcccagagtgccaggcaagaaaccgatttcaccagacagcggactatcagccttgacatacatcagatttgcgaagtgtcccgcgtttaccatgtgcatcgcaccagcaaccgccagcattgttttaccggaaccagccgcacccatgatggtcacaacgtcattgttcttgtccaggatcgcatcaacgaatgacgcttgcagagcatcgcggggctgaattgttttcatcagcttacgctttaacgcttgttcgtgcttaataggcaatacttcaagctgaaactctccagcagcaaccacacgccccacaatctcaccatccgatagaatgtattggttagggtagaaatctgcgtcaggaagcgatgaatacgttataacggcaacagtcccgacatactccaggacttcgacagtttcccagaacagcggcaggtcgatataacctgaatacaacacatcactatctttcagcgagtcatcgccagtgtattgaagaaccggacaacctttagacatcgcaatcaacagcatgttaatatcgcgagtcaccagcgttgcgccctgttgaatacaggttgcaatgatccgcgcatcctgtttatcgagagggaactcttcggggccgacataatcgacgatttttagtgttacattttctggtactgctgggtttgttaagtttaacgaaacccctgtttgggtaattgcttcataattttgtcccaggattgctttggacaaaagccggatcgccagtcgtgcttcatgagcggttcgctctttgcttttcaggtgatccagttcttccatcgttgcagcggtgataatgatttcgctgtcaggttcgatgtaagaatagattgaatatgggttactaatcaaaacattggtgtctaatacgtattttgacatacattaaccttatgtggtttcgttaaaaaatgtgccgaaaacctctttcgctttccggtcataaacggcttttgcttcttctggagtggtataataccccaaaaattttctttttccatctatgtttatctgcgctttatacttcccatttgctttgtgataagaaacacctttcaaccccgtactgctgtttgaattacatttctttttcatcgcgttttgttggttcgtcgctttctgtagatttcttgctgtatctccattttcaacaccatacacatgatctacgataggaggaagataaccattctcaacgtaaaacactattcggtgtcgcaaatacatagaacctttaaaatgaatttgggaatactcgttcttgcttccggcttcacttccaggagacatagggccgcgctgaattttccaatacacttttcccgtagatgtatcaacatctacataactcagaagagactcaatcccttgaatctcttcctgtatggttcttgatgaataaccatgacttttcattacatacccaaacggataatatggatatatgggaacgggtgaagatgacttgaacgcatacacaaggtcagtgtttttgccagttcaaaccgttcgtcgatcgtcatgtcgcattcatcgaaaatcaggttgattgcctgatacttgatcgtttgtccacggaaaatggtattcagatcttgacgtttcgacagaatgaaagacgaatcagcgcccttatccattccatgttctgccgcagcacaaatacccatttgctttgtcggcgcaacgtagatattcagtgtccctttcgactgcttgatgatatcgaaagccgctttggttttacccgacatccggcccatatccagcgcagtttcgaagatagacaccccgccgcattcttgcccccaacgcccatcaatgattcgcgccaggtgcaggttacgtgactgctttacagcgtcaacatagaattgtgaaatcatgttgtcgccttatgcaagttcaacgtgtggtgcgtcgataaatttcgtttcaataggaagatttggatcgttcttccagttgataccgtaacgcagttttacaccctgttcaccagcggcttgtttcactgcattcaggacaggcaaccacactttcgggttagtctgccagccagcagggagaacgctaggatacagatccacagcatcaccagtgatgtgttttgagttcatggtctgggaaacacccttgcggacgttttcgcgctgttgctctacggtgcgcagaccttcgcggacaccgaaatcaacaggcgagagttccagagcacgttttaccaccttaaccagttccggcttcacgccttgcaggttgttcaggcttttctgactaaatttaaacatacatacctctattatgaaaataccctatgggctacacatggtatttatggtttaagaggcgcaacgttttacatgtaaccccaaattgcatcttccgcgcgatcgcgtttccagcgaatcgtcatttcaacactttcctgtttgtcatcaggaggaagtttatcattattgatttgttcaatatatgcttgcgcatctgcttcgctacggaacaacgcatggaaattataatggttgcgcccagttaagttacgatcatccagagagaatttacctttattttcccaatcatcatacacagtgattccgttaacaaacagccccagcccacgatgttcacgcgggaagccagtgatgatatgttttcgacccatctgtgccttttcaccagtgatactgattacttcgtacaggattgcgccaggtttgatatctttcaggacagcacgtttttcaaaagcgttcataatgtattcctcacaattagttttcatatacagattaccacaatctgttttgatgtcaacaaggtctatcgtttttatttgggaaagttaacgtgaaaaggcgatcgtgtaatgcttcgatccgttcatacgcttgtttcaggatcgtcttatcttcagggttcgttgtctcgatgcagatcagttcgtccgagtcgatagcgatcacatcatccatcagtgaagcgaatacgttcacgtcagggtgagtcaattcctttatctccgcttccatcccgtcatgctgggataacagttcgatgatatcgcgctgtaaatctccctggtacgggaatccggtttgaagatgattgataattctttctgctttggtcatatttcacctacaaaaaagcccctttcggggctgggattaaatgtctttgcactggcaaacaccgtatttggtgaaaggcttgtcaccgctcaggtaagaccagaaatcgcaagcctgttcagcggtttcgaagattgcagcatcatagaagccgtgttcttcgttaccatctttattgaggaacacaggaagccagctttgcggtttgaagcagtcagtaacaactacccaaccttctttcgctttcattgcttctttgttcgcttcaaccatttccagcatttcgttcagtaagttcattttaatccccttgtttatctgtttcgttgtctacgagagagatattatcacaacggggattagtgtcaacagttattcgaaacgaattgtgctatttttgaaaaacattccagaacacacagatcctttgatctgcttgccgttcacaccagttgcttcgaatccggttgagtaggtgtctttttcagaacatgcaaaccacttataacccgtgaactggatgttcgtataaccctgtgcttccaggatacgctgtgcctctttctcgtcagtacagtttgactgcaagaacacaacgacgacaaccatcaaaatacacgcaacaattttccacataatttatactcgtttaaggttagttttgcaggcttcaatccagcctgaatagttcggggagaagtcctccgccatacccaaacaaacggtagtatgtccgaatgggttcggtgttgtgattttactattgggattgatcggaagttcactagccccaacactggtcgcaaacaccataccaccagttacgtaaatggtttgaatatgcccgtaagcatcaccaggccatttgaaacggtattcagtgttccagaccttgacgttgtacacatcgtattcatcgaaaagcggatcgttacccttcgttgctttatacaaagcacttcgccattcatacagctttgcttcaatgtcgctaacattgatttctttaccagcgctcaaatcatcaagcacctgttcaatggtgcggattgctccgcttaattcacgatcgagtttcatgatttaatctctttaatagaatcaagttttaaccgagcatcgtaaggcccgaaagcgttgccgttatggtcgaacttatgttcttcactcttccagtatttgccggacttcatcaaaggaattcgtctacgccctgttttattagaatcaaccattcctgtatgtgtgaaaatcatacaataccctcttcttcgagcacttcccagatcaggcgatccaggtgcatcagattccacataacggagtcatacgaacccagcgagcgggagtaaatcactccccatgaacgataagccttttggaatgattcagcactgttttcatcgtgcggcatatcgtcacccgaagcgatcagcagtttcagaaccatcaggctattgagcgcctttggcgtgaattcctgttcgcttaacttcatcgcgtaccgttcgataatcgcgattgacttcggatctttaatacgcccatctgtatgacgcgttttaaacgcgctcattaattcatcgactacggcggtacacttcatatgcttcatccttttcctgtgcagacatccgattatagcggatctcttcgcgctgttcaacttctctcacggcttcggctttcttttcagcggtcagtatgtgatgtactacagcgtttcggatttcccagagatatccaatcatctgcatatcttcaacggtatgatatcctttcatatcacattcaaatacaatttcatcgcgttctgccattgctaattgtgcagtagaaggacaaataaccattccagagtatttttcaatcaacgattccagtgtacgcggttttactggaatgtcaaccgttaccggaaccattcgcatcgttgaatcattatgggattgataaatcatcagaatgtgatctccgcaaactgcattctacgctcaatcgcatggatagcgttatcacgctgttctttgttttcatatccagcccaggtaatcggggttgaacagatcaggtgaaaagtgattgctgggtgtctcttcccttcaacaacgattgttgcatcatcttcgatccaggttacgtgatccagattcaccggatagtttcttacggtaacagtttcaccaaccaaaggcgacacgtccagaatatcacgatcacgaacgtatgatttaatacgagatacgattaacattatttcaactccactgcatatacatcggtttcaggggctttgtgtacgcgcatatctttaccacataccgcataagccggacagttacggcaaccgttatgatccttgttgcccgtcagttctttacggaactgttttgttttcgggtgttcccagatatccttcacaaaatcttcggcttccagaacatccagaccttcttcccagccaccttcaacccagcgttcggtaaacgagcaagggaagaactgaccacgttcattgatgtaagagctaaacatcgtcgcttcacagtcttcggcgtattgcttgtactgttcgaagttcgggtgtccctccatcgcttcaacgaaagcgggggctgaacagctatcgaatccaaatcctacaccagaatcgaggcaatattcaacaagttttttatattgttcgcgggtaacggtgtcccagttcttaccgcgtcccttttgtttcagtcccaggaacacgatcgcgttgacttgtttcaggcgcggatcattcttcacggcatcaaccacgttaaacgcatcatcataggttttcgagctaaccatgaagtgaaggttgatttgctgttgtccggcttctgtcaggttcgctactgagtcgaaagcgacatcaaagccagcgtgtttataaaccgataccgcaacagccccagcaaccgccgctaaacgcgctgcaacgtcttttgatacgtcagcaatggtaaggttcggcacaatgcctttagaacgcgcatacgccatcatatcgaacatatcggggtttgtttgcccctgtgcatcagcaccgagtgcgcattgagtaagccagggcattttgtcgatgatttttttgaagttggcaagatccatgttgaacccgttcgggttattggacttgtagcagaacccgcagagtttacccgctggcccgttgcatttggtagtgatctcgatatcgagaatttcggggaatggtgcgtattctggatcgtgggaatatgttgcaccccagcgagcgaattcaccagtatcaacgttgaaattatagttgtagaacttcgagcgagcgaagcgcatattgccgtgttgatagatgaacagggacggcgctttgatgctggtaacgatatcgacagttttcataatataattctcaaaatttaacatgggattggaagacagcgcgagctagtttttcgctatcgaacgggattgatgttccctggcctttgctgtcaatgttaacgcgccagaactcactcgaaccgtttttggtggagtaatgcatcagcgttaccgttttattcttttccaggaaggtgcgtttgtcaatctctgttttgatttcgtgttgcatcattttacactccgtttcagtttacgttcgtcagccagttcttttttgtacgttttgatgtacttcccgttaaggatgcgaagctgttggaaaactttattacacaaagcacgtttcgctttgtattccggcgtattacggattgattcgatcgtcatacccatttcgtttttagggtacgcgctcaactccctgccgatctctctgtgccagttgcttaactgatcacgctgtgctttgtactcttcaaaagttaacattataactggtctccgtaatctttcgctgcatcttcgggggttgcatccagtcggtaaagctcaacggctaacggactgggtttgatttcgcggttcaggatctcactgataccgcgaaggaattcaatataaggacggaatctcatttgatacgtaccgcgttaaaagcctggttgcgcagttcataagcctgttcaagctgttcagtagtgaacagagggctatcggtattagtggtgaaactacaaatggttttgttgtcggcgttgacttcttcaacaacgatttcgtaaccccagatcccgctgtactcacatttcacgttacggtacttgatgtaaaccgcagcaacatcttcttttttgtagttcttgcttttgtagatgatttccatgatttcctccttcgtttcgatgtgtgtacaataacagttcagggttatcgagttttagcaattcgtgctaattatgccattttcttagcgattttccatgcggctttgaacgctggaacatcttcaacatcaacccagaaaccagaaccgaaaccatcgttgtagcaagggcaaccgtcgcagtagttttcccaggtcatcactttaccaccaacagaagcaccagtttccatcgcacgtaacgcatcttcaactttttccagtttttctgcgttgtcgtcataaatgatgaagtaccatttgccgttgtattcgttacccagtttgattgcttcgcgaacaagtttcatgatgatttcctttttgtctgtttcgtttcgatgtgtgtaatataacaaaagcccctggcggttgcaaggggctttttaaacaaaaagtgctattttgtttcttcgaggattcgaaggatttcggcgcgggtgattggatgttttgccagctcacggatcgcgtgatcaacgtgtatcttacacatcaaaaacttctccccgcacttgtcgcatgttgcatacatatcgccatgtatacgcccgatcccatcggttacagaatgatgcatccaagcgtaaggagttccccgcatccatccggtagcaacatgcttgcatttacgttttcgtccgaacatatcaccacccgttaggattgcggaaatgggtttgccagtagcgcagttgttcgcggttcatgttttgggtatcaatcaccatactctgaatcatctgcaacatcatgcgggtttgattgacatcctccaggctcgctatacgctgttttaaggcttcgttctctttctccaactcaaccatacggttgtatgcgttgacgcgctccagcggcatatcagggcgctctttgaggacacgggcgcgggatacttcgcattcgtgatttgctttccagtgcgcggcttctgattctgctttttgcttgtctcgaagcgcgagtgacagatcgctaaccagatccagaaccgtttgcggatctacggtttccagatattttccgagaccctcttcccagcttttaatctgtgtagggctgtcgccatatggaacaccatatgagaacgcgcgtttatactctttgcccctgaaaccatattcctgatttccctggatgctcatattttcaacgagagtccacttactacccatcatagaagaaatcgaacgggctgatttttcaatttcttcaagtttttcacttgttactttcattttgtactccacaaatcatattgtgcgcgaaggatagcgtaaaggctaccgatattgattgaatcgaccggacactggaacaaatcagagcgcatcatattgaactcaatattgttctgttcaacgaagttaccgatcattgatgtccagcccatcaccaggttatatccgtcttcggataacccgtaagccaggttaaccctgatacaacgcttatcagccagttctacgctgatacagttacttgaatgcatagaattgcatgggaatttgctaggaaacttacggaacatctgggtaaggagtttagccgtttcaatgttgattgcgcgttcctgatccctttgcgcctggttgtcatgacggcgattcagatacttttccatttttgggttgagattcacatgttgcataatatattcctcacaggtttaaagcgttcttttccggttccattacatgaactgcatttcggagatcggtcgctatcatatcgccccgacccgttacatgcaacacatttccgtaatttccagccatacacgaaccgcatgtaataatcggttcgtgcggccttgcgttcgtggaagttcatactttgttgtaaacctgaaccagccacatttcgatgttcggcgcgtaagtaacgtttaccatcggcatagtgcggtatttgtaagcggctttgtacgcatcgagttcagtcggaacacagaaagagaaaccgttgtcataacgttctgcgttagaaacttcacaaccaactacagcggcaatgtttttgttcatgttcatgatgttttcctttctctgtttcgtttcgatgtgtgtaatataacaaagcccctgcattgctgcaagggcttttttcactttaatcgaatttttctggcaattgatctacaattacctgagtttgatggatttcttcactcaatttatcgcggtaatgaaccagttcacgggttctggatgctgaatagctaatgattttatcagcggtagcggtgtaaccgtaaccagcacatgcgatttccagttttgcgttatcgccattcggtacgcggatatgagcataggtcagcaagtttttaaccgcttgtaacagttcatgatcttctttaccgatgataaactggtttggttctactgaatcaacattcagttcttcgtctttgttcattttgcagccttatacatttcaaggacgcggttcatatgctcttgtgattgaggcacacccgcgaagttcagtttgatgaagaattccagacgatcctttttggtgcattcatccagccccagggcaggtaatgaaatgttttcaaaggctcgctgttcgtgtcgtggcatttcgtcccagaacaaacgggaaccgtccggcataggaatcccaatttcaccttcgtagactttgataatcgtcgtcaggcgttgtttgccgtcgatcacttctacccagtgagtttcgttgaactggctatcaaccgcgatcgcgatgataccgcaagggaaaccactgatcagggtagtcagaaacgcatcttgctctttctgcgtccacacataggggcgctgataagatggattcagatccagatctttattcttccaccaatgcagataactcccaaccataatcgcgtgatcgcgactgcgaaaagttaactgatcgcggatacggttatgaaccggaatatcatctttagacatgattcaccacccaacccaacaaaccagtattgatagccgcaacggtaaggcaaatcaccgccaacacccgcgcgttatgaactttggttttcagttctgcgatctcctgatccttttcactttcgaactcgtcgcgggttccatagtaaccaggatcagcagcggttgcgatacgcactttgtctgtttcgaataatgttgattttccatgatccggcacaaccacacccagaataccatcacggtcggtattgacaattccgtgcgttccggctttggcaaacttaccatccttaacggttactacacgatcgccagctttgtaagtcataatatatcactctttcacgttttgttgtaggaactctaacagctttccttcggcctgtaaagcataaagtttattcagctttgcgatattttcaaagtctgatttttcgctgaacgaccagaccccatcatcggaaaccagcgcaccgattgatacgccagtttcaggatcacgcgtcaacgccagccccaggggatgcaggatatctttattgattttccaaatcagccccaattgagataaggtgttgaaatcaacgtgactcatttaggcaatgccccgaaagacagcagccccatacgatgatcgttatctgattcaccagtgctgaattcaaattcttcaccgctgatactgatagcgcggaaaccgtctttcaggtatggcaacagatacagagggatcagcatcatgtttgaatcgtcgctccacttacggaagcccagatttttcatttcttccagcgtcaaatcattcggatcgacgggttcgaaatcaggggaagcgtaaaggcgtccaggcagatcgcgaatatttttcacggtgaatgaatcaccccatgactgatacgcgataggttcagcggcgcgggttgcggtagccagaaggatcatttgacagatttgaaaagttgttgctttcatgatgtatatcccacaagtttagatagaaggtgtcccatagtcttacgcgcatgatcgcggatctggctatacggaacatatttgaaaccgtccatttctgtgatggttcgcccgttcttcacgaacgttgacgcacagaagcatttatcggcttcggggtaattattgcctttatacacgaataagtaaagctcttttttactggtataatccagtcttccgaggctttccagttcgtgcggttcaacaagaactccggtttcttcgaagcactcacggatcgcagcgtgaataggttcttcgcctttttcgatatgcccctttgggatgtcccaatgaggcgtttcggttgcgtggcccattaaaacgctgccgttattcaggaagagaataccagcagaccgttccattactgcaccctgaacttacgatcgtatgctgccagcgctttatctgctgcatcaacagcctgtgtgtgtttgttagcggatttctcgctaaacacttcgcggtaaatgctaacccagagagatcggcgggtatgttcgctttcttcgttgacacgagaagccgcaaaagcgttatgctctttgatcagttgtgcgaattcagcatcatgatcaatggtttgttgttgaatagctgtagaagtcataattcacctatttctttcagttcagttttgagtttttcgagagtcgattggtactgaatgccgttttctggatttggcagacgggcataatacagcgtaccagttttgttgatgtctgacaacacctcttgatcgagggtagccggatcgatgccaaaagccattttaaacatggtttccgcgtctggggcgaatccgtgagagaatgcaaaccccagctttttatcaaactgcatcagggatactttattcactttttccataatgttcttcgtagtcatcgcattcagggagataagtttcgcagaacatgcacagcgtgaagaaagtaggctggcgaatcccgatattatcaggtaagtacatccagaacgtgttagcaaacacgatgaacgttttcaggttttcaacggttacggtactgacaccatcataaccggattgagcaattgcgcgttccaggggaacagggtattgctcgcagtaatcgacgtaatgatcgcttgttacaagcgcattagccgcttttacgagatcggtaattttcatgctcttacatattccactttgacaggttttgcgataaggcgttctttggtgaagccttgcccgttacagatatcacaggtaacgttgaaatcttccatctgatcaacccagccagaatccggcaagccagaaggatacgtgttgacacgcacaacttcgaaccctttaccctcgcatttcgggcatttgtgcgggtactgggatttaaccatactcagcagttgccccagcgtcgttgaacgatcgaagcgttcgactagtgccattacatcagcaatacgaatcgaaccagcatcaataacggtatacaggtttttcggtacatttgagcgcatagtatatttctcacttaaaaaattttttgatgaaagagaggaacaagccaccaccgaacatgatccagtatcccgcgccgtcaccgttaaacaggacatacacagcgacaccatagcaaaagatttccgcgatattcagtaagtttctcataactccctcctttgtctacaccaggtattttaccagaaagtagattactgtcaacaacaaagttttatcaacccacttatcaccagtcattagtaatcccctacaggttgagaagatgcaacgctcaggatacggaaagagcattcattccatttgcaataagttttcgcacagtgaacagtgcctttcattacaaacccgtttgagaacaccagccagtaaagtttcatgattgcctcctttgtttcgacacccctaatataacaaaagcccctgcacgaatgcaagggcttttttcaaatatttttcaacatatacagttgaggtggacaatcttttgaagcaatcaggcgatccaggcgtgacataacgcgtctgtagccgtcatactcgaacttgattttgggtgcgatgtagtttacatggatcgcgtttcgcgtgttcaggctcaacgtgtactcagggataacggttcggaatcgtacagcaatcactggcttttcgtgagcaacagaatcatccatgttttcgaacatctggacggtgaacgcacaggcaaacactttgccattaatccggcgatacgcaataacttcctgcataccttcgtttttcgctttcaccgcgtaatgcagaacgttacacgaataatgtttagcgagactattaagaatttcactgtagaccgcaaagtcttttttgactgacgcggaacgatccaggaatcggtctgcgatgtgatctgtagtcattgaaacctttgtcacataccaatcacttaacgctttactgaaattttggttaacttctctgcgtaagttattgataacatacatcaatcgtgctctgttcataaatcacccattatgtttaaagtattcgatttgacgcagacgtttttccgctgcctctttcgaatcatattcaccaagttctttcgtgcgatcatggttcagtataacccacttatcgccgcgatgttcgatgtgctccgtgatgtcttcgactttcttatccagatccagaggttcagcatcttcctggatgatagtcaaatctacgggcaatgtcaacagtcttttaactccgctgatatcttcgatgcgggaatcatacgcgagggttacatgtggtttgtaatcgtcataatcgtatgttgctccagcatccattgcatctttgaagcggctatggagataatcagactccagaacacccacgatcgtattaccgtatttcgtttcccacttctccacgtcaaccagtcgggcaggttcagagataccggatgcagggaacagatcaaccgtcttacggctatacacaatcgttgtatgcagctttgcagcggaaacaggattctctacacccagaagtttttgcaccttcgcgagcgcttcacaggaagcctgatcgaacttcgcacacatatagatccccggatcaactacgggtttcgctacttcaataaaacttttcatgtgtactccaaatgaaaagggggctttcgccccccagtggttaaacgcctaagcgttaattatgcttttgatgcatcaatcgcttcatcgtcgccagcggtttctgctgttgctggcagaagtgctttgatcgcgccgaccagggcatcaggggatacaccctgcgaaccgtcgatttccagaagactgcaaatttggcctacgagttgacggtgatttgccagttcttgttctttaccctgaatgatttcgttcaggtcgaatacacgggctttcaggatcaggacatcgttttgaagctgttgggtttggttttgttcagtcattgtttacactcttaaaagattgaatacattaagcacgttacgtttcaaatcgtctaacgtaccattatttaggattgtataatcactcaagccaggtgtcaaaccttgctccgttgaatgattatcttcaataccagtttcacgttcaaggaacacaaagcgagtcccgaacttgctcaggtatttatattcgtgcggttgacgcacatcggtaatgataaagtgatccgcataggatttcaacattttttgaatagcaatcgaagtccagatagacggatctattttacaaacaatatcagtcccgaacacctgcatcaaacgacgaatcgtccagggctggctgttttcttcgcaaattttatgagcgataacatctgcgttactcatgaagaacccgcgagaacttaattttttgataccgctagaaaacagcgcgtatgcatcgttattggacatcaccagcggggcttcacgatcaccctcatagaatgggttcttcgctgccagcgctcgcaattgcgtattatcatgatgttccatagaacgtttcaggatagctttgatttcgtcggctaacgcgataacttcaacattgcggaagttatgcacaaccatttgagcaacggtatctttacccgttcgctttttaccacaaataccataaatcatttttgcgttttccgtggagtcggcacgatcacctttccgtcgatttcaatttccatgtgtgcaaagttgaacatcgtcatacaggatacggcttcatccgaatcattagtatacataagctcaagctctccgaggttggagggccaagcgccatagaagcgaaatgtcgctacagtttttgactgcgagttatccaggatatgcaaggccattgcctgttgtggttcactccagcgaacagactcgaaggtattgaaatctacagtaccgagcatccaaaggtaaaccccaagatacgatcgcagttcttcatcaacagcaaaacgaatagtcagtggatcgaactccattgcagatccagggatcttccctcgaatcattgggttcagtgggacatccgtaattggaatgttgatagaaggtagtgtaacaccctgaacttgtagtttcaacccttttacataatcattgtcaggaatatctaacatgaagttagtaggtgaaatctggttcaggatcatagcagttgtattcatgatgatctccattttatagatatttaggttagaccgtgagcgaagcgaacacacgaacgaagtgagtgttatgtacgatgtactgtttataatatttatattttatatatagagaaaacagtacatttccgtatactttttatacaatcgttaactatccgtcttcgcttcgcttgacggaactcgcttcgctcgcgatctaatttttttagttgatctattcaataaataggtatatcatacctatactttcaaaagagattgaaaacatgaaatcattcaaagaactactttctgaatctgttcagaacaaaaaatttgctaaaaccgttgaacttgttgatcgcaacggtgttgctccatcaaaaggtcagatcggtttcctgcatttcgcacacggtgctgattacgatgtttatgcgccggattcccacgatctcgcttacttcggtaaaggtgttgtccgcctgaaaggtaaaaccactggaaaaacccaggcagcgtatattgactgggcgaaaggcactgtttcattctacagcggtgatcctgctgatgacctgaaatttgacaagccgctgaaattcaaaggcgcttccctgtacaaagaagccgaagaaaatctggatctgtataatcagttggcggaagatttcgaaattgatctgcctctggatgaagcactggtgaaaggaaaggtgtacaagctcccatgcaacgatatgtgtttgttgtataccggacgtaccaaaaccaaagctacaggcgaatacgccgtgtttacggttgtagatgcctctggtaagcctcgtctggtatcgggtaaacgctttacccaggaatacaaaggtgatgttctgtctaaactggttctagctgaatcagaagatttgaacgaagccgctaaaggtattcgcgaaaaagttattgcggtgttggtgaaacgtgggtttaacgaaaaagacgcagaaaagatggttgataaaaacctgaaagatgcgatgaaggttcgacctggcgcaacccctggcaaactcgcggaaatcgtgagtatcctgtaaaaataaagccccttcctttcggttggggcttttttgttaatatctgttccaaactttcttcgcgctgtatggttttcctttggactggaaagcctgtgtaggcaaccaaactgctttcgcccaatcttttggggcgatctctgcaagtggtgaacgtagatgggctggcagataggctttgatcatttgatcagccccgcgcattcccttcacgttgttccagttgattttcagtctggttttgttagaaagtcgatctgttgatccgtagccacgtttcaggagttcttctaaaaactcttgacgtgctcgcggtggcgcatagtgcaagttcagcccgtaaagaaccaagttacccgctttcgaacgtcctgaacccaggaaaatgatcagcgggaaccgatcccagtatggcagggtgtctttgtatttcgcatcgtagatgaacgtatacaagcgacccgttgctggtttcgcaaccctgtgcgtcttaatgctggttttgatgaaatcaccaaaccaatcggtcgaatccttctgacgtttcgcagcggttacaccaacagtcattttcttcaaactgtttcggaaatcgtttacgatatcaaccgcgtgttttttgcgatagtcgttacgtttgcgtcgggcttcggtttctgctgtacggcgttcgatttcatcatcaatctgctgcttgtagcggtgcatagactttgtgaacgttgcgtatgcaatcccgttttcgtccgcgaactttttggctgtcatgccttttaattttgcgcgtcggaatttgataccaagttcaacccattcacccagctttcgcttcggtggcggttttggcttgtcttcttctgcgatgatctcgaactcaaaaataaagctcataattccctccgtttagggtatttattgccctttccatccgaacacacgtttcaacgtgtcctctgtgatgatcttgaactcccagcccttttgttttgctgctgcattcgcggctttccatttgtcaatgtttacagcataagtatacaacgcatcaacaaatttctttttgttgtgaacgttgttgttcgctggcttaggtgggggcaacgtttctttcatcggtttgacttcccaaaggtaggtcacaccgttatccatttcaacatagaaatccatgaagtagcgccgtcgctttccgtctgcgttgctgaaataagggatcacaacctcttcactgttccagcgtttcacatgcgggtttctatcaagccagttcataatatatttttcccagcttgaacgatacgttatctttcgcggatctcccttatatttctgtatgttctggggcataaaagaccccttgtatgtctgtcttccagccattttagatcctaaatatagtaaacattagataggggaaattacaatgttgttctcattctttccaccagttgattacaaaggcacaccaactactgatatctaccgcgattatcgtttttactttaaccgcgtgatcaggaattataagccgcgtacatatcaactgacaggttcattaagacccgaacaattagcggaaacgctatacggaaaccagcaatactactgggttatcctgatgcttaacgataattacgatccgttttacggatggattaccga

SEQ ID NO: 38 - DNA, 177538 bp, Unknown
  source: /note="Description of Unknown: KP2M-M0110 Bacteriophage sequence"
ggggctggctgtgctggcttaccgccactatacaggtgatgaaaatgattattaaagaaatcaaagggaacgctgtagagttgttcctgaaacgaaaagtacacttgattcatgggtgtaactgttattgcaacatgggtgcgggtattgctaaagaagtgaagcacaaaatccctggtgcgttcaaaattgatgcattgacgatgaaaggagaccagcgtaagttaggcactaactccatctacatgacggaagaaggtcagattgtcttcaatgcctacactcagtttaaattctggggtactggcccgcaagtggattatgacgcaatccgatcatgctttgtgagcgccgtagaacgcgccagtgcgtttcctgaaaaattgcctatcattacccctcttatcggtgcggggcttgctggtggcgattggttgcgtattagcgccattatcgacgagtgtacgggtgattatccaatcatcgttgttcacttcgatccatcggttgatccacataaggcggatttatcatgagaccgcaagaacaaaagctgttaaaacacaagctgaaacaactgggcgaagcgtatcaggattatgccgaagatgatgatcctgattcacgtaactacaatcaatcctgtatcgacgatattacagcggatatcctggatttcgttgaaaatgaaatcaccgatgctgttcgtgatgcggtagcggtggagcgagctaatcatgactgacaaaatcaaagctaaagcaatgaaggtgattgcgacatacggaacactccgttggtgtaacgcgcaggtgtgcgggtgtatgggttgcgcaaatcatactatgacgaaagaagagtatgatattgctatccagataccggaaatcaaagagcatcttgcgcgacataatgaaaaactcatgggtaaaggatggttttcaattggctaacgcacacattatagaaaaagttcgttgtcgggattgtcattttcctttgatttgcgtcatgaacattgacaaacccccttacgacgagtgggattggtggatatactgttcaaacaaaacatgcaaaaaccatgaaggtgagggcaaattccagaatcatattaagtttgtggagcgtgtcaatggctaaattgtattatcactatgcatccatgaacgctggcaaaagtgcgcgactattgacggacgcgcacaattacaaagagcgcggtatgcgagttgtaatctataagccagcaatcgacacccgcacatcaaacacagtgagttcgcgtatcgggctgaacgaaaagtgtgaattgattgcgcctgatatggatctgttctgggacattcagcgccggaataaaattgcttgcatcttcgttgacgaggcgcaattcctttcgaagaaaaacgttttcgatctatgtcgcgttgttgatgaactcgaaatccctgtaatggcttacggtctgcgtactgattttcagttgaatctgttcgagggttcttactggttgctggcctgggcagacgagatccgagaactgcgcggaatgtgtcactgtgggcgtaaagcaactacggttgcacgtatcgacgcacaaggcaacttcgtaaccgaaggggcgcaggttgagatcggagccgaagacaaatacgtttcgctctgtcgcaaacattatcacgaaaaacttcttgataatgttggtctgaactgttaaggtgtattcagacaaacaaaggagaacactatgagccgtacttaccgtaagaaatatgttccagtccgtgataagtcctctatcgaacaaatcgaagagacaaaagcattttcacagtattatgcacagcacggagaaagccctgatggtattcgttggtactcaaccaactggaaacacaaatcaggttgtgcatatatccggttcgataaaaacctgaatcgcgacggtaacaaagctcatcgtgatatctccgcgatgctttcaatcgcagtcaaaaagattgattcgaaagtacgcgctaaaatgcgtcaggagttacgccggatgaaagctggcgtgattggatgggatgaaaatatcgagaacgcaaataagatccgcgcttttgagcgtagcttatgctggtatgagataacttgatgtatttttagactaattttacataaggggcgattcgccccttttttgctataaatatatacaggaacggatctattgttgatccgtaagcacgtagagaattgcttatgaacattaaacgcatatctaaagcgctgatgtttggtttgttaatcttgtctccgtcatcacatgctgatgataggtcagtagtcgccaaagagttcgattactatatcaatgcggcgctacaggtatatcttgacaccatccctcccagcgtaaataccagtgaactattctataattacatggaacgaaaatggcagcagaagcaatgtaaatccgaacccgaatgtaaacgtttagggctacgggttgcaagtgaattcgccgctattcatcgttcataagggatgaagatgcagacgtttaacgaagtaacagaacgcgataccgcgagtaaaattgatgcctttattggcacttgcttaatgtctgtaacctatatgcacagcgcacattttgcgactggttcatattcacagcataaagcatttgaagggttttacgaagatatgcaggatttggttgataaattcaccgaaatccatataggcattactggtcgatacaaacccgtattaaaaacagaaaatgtgcttgacacggtcgcgtatctccgtaaaatagccgatgaagccaacgaaatctatgattcagtagatagttcattgaagaacgtcctggacgagatcaaaggcttgtgctatcaaacgatttacaagctgacaaaactttcttaaaaagagtttgacaagcgaaaaagtgatgatagaataactatcgaattgaaacataaacccaatggaaataatgatgaacttaaacactatcgtaaacaacccaaagaaaaccactctgatcgctctgggcgtaatcgccgcactgtggctggttccgaactcgtacactatcgttcaggatggtacggtaaaaactcaaaccttcatgggtaaagtttcaccgaagcctgttctgcctggtttccacctggtaaatccactggctgatttcgaggtgttcaacaccaaagacatcgcaatgaagtttgacaaattgcaggttccgtcccaggataaattcaaatccactgtggatatgaccgtgatgttacagttcgatggtagcaaagccccgatcaaccgtatcaatgcgggtagtcaggatcaggcgctggataaatatgtgactgaaaaacttctgtcaactgtccgtgagttcggtaaatctgtaccgaaagcacaggatctgtataatgcagaagttcaaagccagctacagatcgcgatccagcaggaagttgaagagtatgcccgtccttacggttacaccgtgaaacaggtattcttgcaggatatcgacctgccggaagcgatcaagaagcaggttgaaaacacgaaaattcgtgaagaacaggtgaacgcagagaaagcagaactggcacgtaaagagcaaatcgctcaacaggcagttgttcaggcagtagccgacaaagaagcccgtagcaacgctgcacaagctaacgaacgtgatgctgatgcccgtctgtatgcggctaagaaagaagccgaagcgaacgccattctgcaacgcacaatcaccccagaaatgatccgctggaaagaacttgatgttcagcagaccatcgcggaaaaatatcagggcggtgtacctcaaactgtcatgggttctgattacgctggtaaagtgattttcgattctcgtaaataagggtttaaagcccccagagcgggggctttctccgaacgagaatactacaatgaacataaaacagatcatccttactatcttcatttcgctattcttcggctttattggcggttttcttggtgtattggtgattgcgtctgttttatgattaacctttaaacgtggagcacgttatgaaacaatttgataaagctgtcgtaattggcagattccaacccttccataatggtcatgcagcaatggtgcgtaaagcactcggagaagcaaagatcgtttacatccttctgggttcagcatatgcttaccctaacgttttaaaccctctgacagcgaacgaacgcgaaagaatgatcttttcgtggctgatgactgaatacaaatacgaagatgtttgtcgtgttaaatttgctcatattcctgattatctttacaacgaagaaaaatggaaaacctctgttcgtacagcaatcgacgaaaccaaaggcgacaacatcgcgatctatggttacgaaaaggatgctgattcatactggctgaaagcgtttggatggactcatgttccggtagatccagttaaggttgacgggaaagatttatctgcgaccgatttgcgaccaaccatctttttgcataagaatggatgggataagaaactatctcgttatgttccttcgtctactgtgagttatatcaattcatggatgatgacggatacattttggcgactgtactacgaatacgagaaatgggaaagcgaattggagaaattcaaaaactacccatacccagaagcgctaaactgctgcacgggtgatagtgtggttgtgtgtaacaatcgcctgctggtaattcgtcgtaagttcgcaccaggtaaagacgcgttagcccttcctggtggacacaaaaacgcaaatgaaacgttcctggattgtgcgatccgtgaactgctcgaagaggtgcggatcaaagttcctgaaaaggttatccgtggttcaatccgcaattcgatgttgttcgatcatccgaagcgttccgtacacttctcaaaaccgactgtggcgcagtacatcaagttagagcctaacaatgatggtagtctgccccgcattatgggcggttctgacgatgcgttagaggcgttctggatgcccttacatgaggtcgtacaacgacaaggggaattcttcgatgaccactatcaaatcgttgtagctttcacgggactctgataaaagattaaaaaagcccttgcgttcgcgtgagggcttttgtattatatacacataccgcatgaataatgaaaaggaagaaaaatgaatacgatcaacgtttctaaagctgatgttatgaaagcaacgattattgctaccgaagccatttcattcatggctaagaaagcaggagttgatggtgctgttatcctgatggagattacaaacaacccagaaggcaacaccgcaaggtatttcaaagatcttacttcctatgcaatggaagaatttaaatgattaaacgtccttactgcctcgtaaaccgtccgatctgtgcgggtggtttacccgtcaactgctggcagttggttgaaacaggtgaagcgttcctgaataaacgcggtgataaagtattcgtctatggtgtggactcgatcgagaatgaaacgatggtgatcaccgacgagaaaacaaaagaaaaatatacgttgacttccgaccacgattgccgtaacttcaacgtgtactggaaatctaatgaagactttgaaggaattaaatcatgaaagtagcaacccttagcggtatctctgatgtaaaatgtcgtatgtcgctggaacccggtaatcgtgtaggaatcaaacacacgggttcagtaggtacgaagaattttactttgcaatctgttgcgcgtgataaaaacgatatggtttatgtgtttgttacagaaccgatgtcgaataatatccgtcaaacactggtgatgaaactgggaaccaaagatccggcaatgctgatcggtggaactgtagagcctgttactgttgcgagcgtcacacataagggcattgaatgcgccgtagacggcaacggcaaactgtcctacgaagggactaaacgccaacccgtcgatcgtccggttgttgttggggatatcttcacgtcagaacgccgtgaataccacgtcgaatacatcgcacaagatggttctctggtttgtcgcatgtactcacgcaagagcgcagacgataacaaatacatgggattgaccatcattgatggacgtgatgcgatcctgctggattcactgaatgttaaaattaagtttgcatactcatgattcaaacaattagcgttattatgggtgatgtcgtaaacatcaatggacacgattactacgtagcggaaatcaatacaaagggtaatcgtgagatcttggaactggacattgtaaggccgtccgaagggcaatcccttacaatcgaagtggttcataacacgaacacaggggaagacgtagtgaagccagttctgtcccgtcttccggtgttctactgtgaaaagtcaaaacgttggaaaatgaaatgaatccgaaagatttaactgatgtgaaagtgggtgataccctttacgatcctggcgaaaggttatacaatacccgtaaaacagcaaaccctcgcgaatttcacgttctaaaggttgcgcgtcaatatctgtatgcatccactgataaagacgctgatttgaaaagctggaacatcgagaaagtcgatcgtaagactggattgacttctggtagtgggggctggggcggattttatatgtatcgcagcgaagcagtatacaaagaaatccagtatcgtgctgaactgagtgaaaagatccgaaaagagttcggttctcacgctgttgttgttcctgaaatcactaccgctgaactgcgcggtatcgcaaaaaccctgggggttaaattttgaaaactgtaatggaaaccgtgtttggttctcacctgtatggactgaacacaccgacaagcgataaagactataaagggatctttctcccgcacccgcgcgatattctcctggggaaagccccaaagactatcgacaccagcacgggcgataaaagctctaaaaacaccgtagacgacgttgatcgtcagttgtatagtctgactaagtttatcagccttgcgtgtgatggtgataccgtagcgctcgatatgcttcacgcttcggatgacaagctgatcgctaactctgaaatctggcagtatatccgcgctaaccgctggcgtttttacaccactgaactaactggcctgttcggttatgttcgcaagcaagccgcaaaatatggtgtgaaaggttctcgcctggctgcactgcgcgaagttgtcgatgtactgaaagaaaccgaaacgatcggtggtattcaggaattcacaccagatatgaaacgctatacgcgtgaagtgaaagtgtctgacatcaagaatcgtttccctacaaacgagttctgccgattcgttaccgacacgacaatgaaatctggttgtcaggacttctatgaagtgctggggcgtaaattccagttcacgatcaaagccgatgaaatgcgtaagtcagtgtacaaactctgggatgaatacggagaacgcgcacgacaagcagaagccaacaacggcatcgactggaaggctttaagtcacgcgttgcgcggtggtatgcagttgatccagatttacaaagatggtgatatcgtttatcctctgcctgatagcgcattcctgaaactggttaaagctggcggcgtaccgttcgcaaccgtacaggaaaagctggaagaagtcatgggcgaagtcgaacggcttgcagcgatttcaacatatccgaaagaagttgaccgcgaattctggaacgatttcatcgaacgcgtataccgcgatcatgttgtggggtattacaaatgatgtatcctaaattgtccggcgctgaaattgatgttctgtataaactttacggatacgcaactaaagtgctagacttagatttcaatgacgtacccagcaaatcagggcgtgattccctgattcaaaaaggttacgctcgaagagtaacgggttatcacgataattcgaaagcatggttgctgattaccccactggggattgacgcataccgacacggtattaaaacggagtggcactaatgactgatgttattttgaacgttaaagatgttgtactgggcgataccaaaaacccagacgcagttacactggaacaggctgttgttcagatcatgcgcgatagcctccgactggaagttactgaacgtaccgaaagcaattacaagggcgggattgatggtcgccagttgtacgaagatagcaaacacgttaatgtaaccctatgggcggacattgacgaaaactcatacaaaatcgacgagattgattttgacgtatgaaaataattgacctctgcgctggtgtgggcggggttcgattaggatttgataaggcgttcggcggtgtcgaatgccttttaacgtctgaaatcgacaagttcgcacagcaaacatatatcgaaaactggggcgatgataacctacagggtgatctattcgccattgatgaaaacaaagtacctgatcatgatatcctgctcgcggggttcccgtgtcaggcgttcagtaaagccggattgaaactgggctttgatgatgtacgcggtacggtgttcttcgaaatcctccgcattatacgcgctaaaaagccccgtgtgttgttctttgagaacgtgcctgaactgctaacccatgacaaggggaagacgtttaaaacgatttacgggcttctggaggccgaaggatataacgtattctatcaacgcctgaacacaaaggatttcggactaccccaaagacgggaacgcgtgtttattgtctgcttcctggatgatgtattcttttcgtttccggttcccccgcgtacccctacacgcgtaggcgacatcctcgaagatgctgatgattcgttcaccctgtcagataacgcatggaagggctttagagagcgtaaggaacgaaataaggcaaacggtaagggtttcggttatcaggccgtcacaagcgattctacgcacactgggactatcacccagcagtattacaaggacggcgttcaatgtctggtgttgcaggaaggaaagaaccccagaagacttactccccgtgagtgttttcgtttgcaagggttcccagattcatttatcataccggatagtaaaaaacaggcatatcgtcaagcgggaaattcagtttcaatacccgtgattgaagccatagcgaaacaaattaggaaagtattatgagaaatcaaccagaaatcccgatcgataccgttgttgaatggcattacaaccactgggataatgatgaatggtctgccagccagggcgtattgaagtatcataaaggaaacttcatcctgatcgaactcgaaggtaagccaaccgtgctggacggtaaagatttggtaatgcgtccgtacaaagaaagaccggaaacaaaattcttcaaaaaagtgtttgcatccagtagttgatagtggtatcttagctttaccgaaacgaaactgaaaaggaacataccatgacttttaatgacctgtttaacggatgtactggcgctggtgcgaaatttaatctactgaaagattacccgctgggttctaatccaggttacgtgatggttgaagtgcgtaacggtgaatactacaacgtgttcatgtgggatcgttctttctcttactgctggttcggtgcgaaatacaaaccagattacatcctggaacaaatcgaaacagtgaaagcgaaaaaccctgaactgtacgcgttcgcagagtctattcgtggtgtgttcggacactgattaatcaagccccgaaaggggctttttcgtgaggaaattattatgatttacactgttgaatgtttggttgattatgaacctggtaatctgatctgcgcgtctgataccgttatggactgcatcgacgcggtgaacaatcacgaaaccttcccgtatgttgcggataatctgcatttcactgcgtggaaagacggcaagaaagttgcggttgcttctttagtaggaaacagagtaggcgatacaataggcgctaacggctatgaacctaaccctgtgacatacgaagaagtcattggtaaaatggaggcggtatgaaggttaaaaacgccgaacgctgggagaataccaacgaaatgttcttcattcgttgcaaccgtaagcctctcaaatgcgggtatgacgacatagacgaagccctgagcaagtttaacgaaatcatccgttcatccgtctaccgtagcggggaacatcctggcgacctgtgggaactggtagcaaaagatccttacagtaacatcgtcctgaaatctgaaacaaaaggtaaagtatcgtgaaaatttatactgttgaaagtttaagcgaagattactatacatttagtgatttggtcggttctaccgtatcgctggaacgtgcgattgaaatggctaaaccttttgactgggtaagtatcactgaatgcgacggctttactggagaacgtctgcgcatagtaacactgagcaacgaaaaagccattgcgaacgcaaccaaagaaaacttacaatttgaggatgtaaaatgaaaatccgttctggttttgtgagcaacagttcatcaagtagtttcatcgtccggttcccgaaagatccgactaatatcgacaacctgcgcgaaatgatgggtgattgcgttccgaactgcggttactacaatcctccgttaacagcggaagaagtggtcaatcatgttcaccgtgacttaggcggtcatctgggtaatagctttgaatcgttctacgacgataaacgctatgactgggaaaccgaagaaagcgcagaaacccgctaccgttcaaaccctcaaattgcgcttgcgtatgacgggcgagactggtacgatctggaaacagaagagaaagacgctctgatcaaaatgtggttgtacgaagagtacaacacgaagttcggcaatcaggacggcgtgtttatctatgaattcacgtactccgatgaatgcggcccgatcggaactcaactggaacatggaaacatcttccgtaaccttgaacacacatcaaagagtcatcactgatggataagttaaaaaccgaagtctgtgttgttatgcctcgctatgcattaggggagtcgatcccctttagccaggatcgccccgcaccgtttgatgtattttctttgcgaaaatatcttgaacgatttgaactgaacgagtatactctccaaatcgttcgggtatggaatccggtaatgtatgcgcttgcgtttgacgttgctgaatccaaactcactacgatggatgaatacgttgaactcctggcgcgtaagttcgggtgtgatcgtacagtcgaagcagtaagcaataaagttaacgaaattttagaaaaattcaaatacgagaaaatttaaatgtcaatcacaaatatcgaattcaaaaacgctgtatcgaagccaaccccgacaaaccacgttttcgtgtgtgacgtatccggttcaatgtacaacgaactgcctaagatccgtaaacacctgaaagcaaatctggcgagtctggttaaacaggatgacaccgtttcgatcctgtacttctccagcaaaggcgattacggcacggtgttccgtggtgagaaggttagcaatgtctctgacctgtctaacatctgcgcggctatcgaccgttacctgaaacctacgggttgtactggcttcgttgagccgttgaatctggctgcggaaatcgctaccgatctgcaatccgaaaacggcaacctgaacagcctgatctttctgacagacggttatgataactgctggcgtaccgatgacatcctgaaagcgtgtgcggttctgccactgactttcaacagtatcgcgttcctggaatacggttattatgtaaaccgtcctctgctggaaaaaatggcagaagcaaccaacgcattgcacaaattcgttgaaggtttcgacgcatacgaaccagcatttaacgaaatcatcaccgcgcagacttccgcacgtatcgaagtcaaagttgctgatgctacccatgcgatctacctggacgaagggcgcgtgtatgtcctgaacgctgcaaacggtgttgtgctggttccagaacacatcaaaaacatctgggcgctgggtgaaaacgcgattaatgatgttgacggattcgatccgaacatcgccagcgaacagcaagttctgtatgtcgtgctttatcatgcactacacacaatgaaccctgatctggcatggaaagtgcttcaaaagctgggtgatgtccgtctgatcaaagcgtatgacaactgctttaccaaacaggactactccaacgcaaaagacctgattgcacaggctgttgtagatccgtcacagcgttttgttgatggtattgattacaacatggttccagacgaaaacgcgttcactctggttgatgcgctcgaactgctggcacaaactgacacagtgatcgacctgtcttctgagcactgggcgtacaaccgcacaggccgtcagactgtacagaaagaagatgatacactggatcaactgtctgaacagatcgcaaacgctgcaaccccagaagaacgtaaagcactggcggcgcaaatggtagcgcatgaagtatgggttccgaagttcacccagactacaaccaaagtatcggttaaacatctggtgggtaacagttcccgtcctaacatttccatcaacacggatctggaagggtatgtgactatcccagaaagcaaacagaaagaattcggtctgccggaaaaaatcgaaactaagcaggtgcgtaacttcaccatcgttaaagatggtatcgtgaacgttaaagttctgccgctggaaaccgatattccgacactgaaaaaccttcgtgcttctggcctgactatcaagccgctcgaaaaaatcggtgatgatcgtatgtctgttctggtagactttacctctctgcctctggttaaccgtggcatgactcgcgggttaagcggtaaagagttcgtgactgataacgtgcgtctggaaatcctgaaaggccgtcagaaggttatgaagttcttccgtgacaacgcgatcggactgcgcaacgcagaagggctgaaacagcgctttggtgaggctgcgggtgaatggctgtctgaacagggtattcgtgattacgggttctctccgaaggttgagcgcacagaatcgactgatgtttacatgtcgaaagaactgaacgtgaaaatcaagggtgtttcctcccttcctgctgtagcggctaccgtcgcgaagcgtgaagaaggtaagaagaaactgaacaacggcgacctgattatcctgtgggcttacgatcaggtgaaatctgaactggatgcgcttgacaaagatcaggtagtcgagtatcttgataagcagacaaaggcaacgattcaggaagtccgtaaactgaatgctcgtttaagtcgcgtaatgtacggtgttgtagtagcacatgcatggttcgcggatctggacttcgaagaaaccaaagtttctatcgctgcgaaagatattcttccgaaagaagataatattccgtccgatttctggaaagtctgggaaaccacatcattcgaatgtgaaattgtcctggaagaaaaagaagtcaaaatctaacaatgtccgcccccgaaagggggcatattgaggaaaatactatgtcacgtaacgtattctggggtgaagttgtaaaaggcgatatcctgtacctgtccgaaccacaagcctatcgtgaaaacaacgaaaagaaccacgcatacgcgcctatgctgccggatttcgtggttgttgatgatgtatttgtcggtgaaaatggctggcagatcgatttagtcgggttcccttacaaaaagggtgcaatccttctcgaactggaagaccataatttcttcgcccatgttggcaatatcggagatcatggtgaattcggtatcgaagatatccgcgaaaacccgtatgtattcagcaactactacaaggtcggcggacacctgcgcagtgataacaaaactgttctgtatctggatggtcttctgtctggaatgcataatttcagcatcgagaagccaggcaacagcgcagaactctaccgcctgtttgagaagtacaatcatcaagatggtaaactgttgccgtcagaaatggcttacattgtcaaccgtctgatcatgggactacacaaaacattcctgattcactttgacggtgatgtacaacaggcgatggaaactgtgatcaccatcctgaaagaaaaatcacgctgcatggataccctgtcaaaatgactctattctttatcattgcattgggtgtgtttattctgggcgctgcgatttcattcatggcgttcgataagcgcgaatatcaaatggttgtcattggccttatcgtggcaagtatcccgctggtgttgtcatacaacctgtatcatgagaaaatcgcggagaacgcgaaatatgaggcaagacgatgaagattcgttctgggttcgtgagcaatagctcaagcagtagtttcattatcgggataggacttgtccgccctggtaaagaacaggaagttgcaaagatttacggtgagtcaaacgttgaatctctgatggatatgtttgatgatactcgtcctcgctgggatttacctcaaatacacgatgacggcacaatcacactggaagcgttcggatgtaatagcgtagaaataacccgcatctgggacaagttgaaagaactgaatctggatgatgttaaaatcgttcacttcaatgagcgcggcggcgaaccggaatacgacgatgaaaccggaagttataactatgactggtatgacgacgcggacgcattcgggccggaactcgaaaagaaatacaatctcctgagagataaccgcgaaatgttcattgaaggtgatgttcgttgcggtggtggttatgacggctaaacgattggtgatctgttatcgctgtttgcatgtgtatgatcacaacacagcgaagcgaacagcaacaaagcgcttgcgcgttaaagaggcggaatgtcctctctgtaaatgtaaaatctgtttggggtaatccatgataacgatagtatactgggaagaactggaaagcgaattcagtgatgaagctggggaatggctgctgtagcgggtgaatctgaaatgcttacagctaccgaaagcatggatgatgcatttgatcgcatcaagaaacaccagaaagaaaacgaaggtcgggatattcagtacatgctatcgttctggctggatggtgaaatcttctgtcatgctgctattgctgaggatactccggtcgatatgtgtcgtgaagaaatcgtgaagtacgtcaaatcttttatgcattaattaaatgagaattgaaaaatggcttatgtatctaaaaaaattgaaataatttcgtcgatgatgggtaaaactctggaagagatcgaccggattgggaagaactttaaagatgaagttttccgtttacctgaacgtgaaataaatttaatcccgtatttcaacacggttaaaattctgatcgatcctagttttggtctaacggcaactcattacattgtcggtaatgctccatatatgttcgtgttcagaaaatctaagctgattgcgtatttcgatcgcgctaatcttggacacattcgggcaatcatcgaccggatcgaccgttatgaagtcgggaattacacggaacaaaccagacgcactacatacggaaagattacgagtatgctggaacaaaccagacaattcgacggagctaacatcgaattgattgatgacctgctaaaaagaatcaacaagttcaaagaagcgtttgacgtaaagaaaaccgtgcttgctgaaccagaaacggtgaaagcaccaaccctggcatctttcgaagaaccagaaaccattccagtaaacacagcgttgaaatacatcatcgaaatcgaaccaacagatcttgatgcaacatgtaaagcactgaattctatagggattaattttactctctataataaattcagttaatccaaaaaagcccttgcgttcgcgtgagggctttgttatattacacatatcgaaacggaacagccaaaaggaacgagaacatgaaagctaaaatgatgaagttcgtaaaagactggagaaaaggcgcggcaatcggtgagagctatgtaatcgtagacatcgaaagcaacctgctcgaaggtgcgaacgttttagaagttcctcgttatggtatggttgaagccgctgataaagcaaaagaactgaacggttacgttctccacatcatcgaagcaatcgagaaggaattagcatgaacagcgtttatctgattgaagaaaccattatccagccaaacggcggagtgtatgaaaagaatatcgtgtgtgctgccctgaatgaacaagaggcagatcacaaagtgaaatatttaaatgaaaatgctgttgtatgtcagacgtattccggttatagtgttgcatatgcttggaaagcggttagtttagaaacccaaccatcttggttaaaaataaggggcttatcatgaaaatgaattacgttcgcggcggtatcatggcactgttactgaaaggtgtttctcgtagtgagaatcgtatgggtatggggccgatgggtaaagtctggtctgtctatattggcggtgactgtatcggttacatcggcaatgatggattgagccgcgtttacctggctatctcaagcggaggccgtgaagtcgaatgtagtaatttcatgcaagcacttgcgcagttcattgatactgcgattactcagattgaaaaacagggttgtatcgaacgtcgttacgcgaacaagatcgggatgattgaatattccaacttctgcttcgaagtcgaagaagtgcgttatgatacgatggatgaagtatacgaatatgtgcttcgtggtgaggaagtgattaagtcctataacgggacgaaggttgtcaataaccgctctttcatcactccgttcgaattgcgatatcaacagctaatgggctggatcgtgatggaataagaaaagcccctttcggggcttttttgttatgaggatgatagctggagtttgattctttctatttcttccggttcatcaatgatgctgtagtaaatcgttacggtgatcgcgttctcgtcatactgcggaatcacttcaacatccagattgtaaacacggggttcgtatgcgcggatcgcggagacaatcgaagtccttactgcttccgctgttagcgggttcatgttctcgaaaatctgttccccgatctcacaaccaaagttgctatcgaaaggccgtgtgcctttttgtgttgttacgataccgatcagactattctttaccgctgccgcccctttcgaggcggttacgtcattgttccagtcttttgttaagttgggatcgatatcgctatacagtaagcgaaggttaacacccattttatccaaccacctttagaaacgcctctaagcctctcagtgcaacgatatgttcgtagccacacgaacaccttaccggaatgtttgcaacgattgctggcttatccagagcgctatttattgatttaaagaccggatagtcgatactatccagaacggcttctttctctgactctttacagtcatcccataagatttgttcaccgtcgatgactacaaacttaatcagttcgggtaactcttcctttccggtgcggtgtggttcgactgaaatcttgatctcattgccgtacagcttttcttcgtattcgtccaccatgatatgatgacgattgagcacaaacttaatcagttccccacattcagggcatttgatttggagatctacagtctctttgttgatactgtcgaacagagccataatgtaaacataatcgcgctgatgtctgaacacatcaccttcaataatgaagttatccgtgtcatcaagatcgccaatggttaacgggcgataagtcacattatattttgggatatgtcggggtgtatgtttacgcatttgcattctcttttcgtttcaagtcttccgccagcaatgcaacgtaaattgaacgttccatcgggcttccattcattataggttcaatctgtacggtattcttatttaacaaatagttggttttgaagaactcattcagttctgatttgttgaataggattttgtacagtgtcaataagtcgctgaactcaatatcacgcacggtaacatgacaggacttgcgtaacagtttaacgatattttccatatcttcaatagacaccagatccaggatcgcgttctttgtatcctcgtctaatgcattccattcgtatctttcgccgtcctgcttgacatactggatacattcaaggaataattgttcactgttgttacgatgtttcgggaatttgaatcccagagtaagcgagtcatcaagggcatattcattttgcagaacgtaatcagttacatgcatgaatgcttctgattgtccgctgcttcctttgattcggatcttgattgcgttcttaccgaacgatacgcaatacaccttagtgaatatgttttcctgttcggtgcgggaataacccggatacagaatatctaaaatttcatccagcatttcttgctgttctgtgagcgtcttcccttccatgtccgcgcttgtgagtaagaaactcaactgatcgcgcacggtaaacatagggaatcgcttcactccaccagggagttttacgcggattatatcaatcattttaacctcaaaaggggctttcgccccttattgtcctgtaaccacaccacgaacggcaattgctgcgccttcgataagtgattgtttgaatccgtcccaaccttctttatctgcttcaacaagccagcctgttttataggcaaagtcaacagtgaatgtccagatttcgttattgctttcataactcagttctgggttgctgactttaacaggcaaacacttctggaatacatacgtgctgtgcgggacaccatcgcgattgtgtaagtttacctggatcgcgcttgatacttcatcaatgaatgcgaactggcctgatacatcatcacgaatagctgataaccattcgttgaatactttcaggttacgcgcttctgaatccacacggaacgttagcgataattcaccattctccggtcgggtgaatcggatctggggtacaccgccattatacacgtattcataacccagtgttttaccaggcaactgaacgccaacgatgctcaaccccatattgtacatcattttgtcacggaattctgttagcatctgtccgtaaacactatcaccaaacagggaagtaattaaacgagggcttaacgcccccatgattttactgaaacctgttttgttcagggacataatagctttatcaaccgtatagctgaatagcttgcttacgccccctgtaatagcgttcatgaactcgttcgggttattcgcgttaatggaactcatagtaccatcaattaaagtatcgcggatactcccgatcgtgctgtcgagaatgcgtgatgctggactggttgcgaatacaacactaaacaggttgcttcgctgaaagtctctatttgccattcctgacaaaaattcatctacgctatagaacattgttcccccttaatactgcgtatcaaaaatcgaatcctgacgcatatcgatcagttccataaactgaatttcgatttcaactgcgatcggggtgttcggtgattctctcaacgtatttacaatgttgtccattgtacgcccgaaacgaacgctggtaatacctgctggcccaaatgtagaatgagggaaccgcaaactgtcacctgtctggaagtcacgaataaaccacacaggaggcgatttaataacttcaacgttcgatacgaagtcaacaatctgatccccgatactgccgttgaaatcgcttgctgtcgtctggtttgttgatggtgcaaaaacgtttgcaaccttcgaagcgctggaattatacgcttgcttaaccagtccggctaattctgctggagtaccacccgaagtagtaccataacccaacaccgtgaacaggtaatagattttaatcagttccagcaggtcataacggctttcgataacgaatgtattgtaatacatctttgtgcgcttatcagagccttgaaacgctgctttcgtaccgatgtcgattgcttccctacggtctgccagaataccaccagaaacggattctacagcgccccagataacgtttgatactgcacgggatagacctttagcaacaatactatcggtcgcgtcctgatagcggtgtgagttcacttcgttatcgttcaggcttcgcggtaaaagtatttgacaaattgggttaagtgtacccatagtacgggtattcaaaacctgtttgtatcgaacgttcccagtgttggcactaaggatctgttgcgcgttctgtgcggcctgacgcaatgagcgatagttatctttgcttcctggtgcaagtccaccactgaaatcatatgctgtaaacagcaagccgttattataaaggcttgatgcgttgtacgcgttatcaatacctgctgcacgttgggaaggaaattccgctgttacgatcggttgagtcaacgcgtttttagttgttgcagcacccccagaggggatgccagcatttttgatttcagcaaatgattgtacagtgtcttgcaatactgtaattttcatttaaatttcctttaagctaatgcaatcaatggtttacggtcagttcgttggactgaatgctgaaccgtgttgtttactgttttgttgttgacctgaacgctgttaggcgttgtaggctgaacaggcgctttcactgcttccggttgcttgtcaatacttgcactcgtttccggtactgcggtgattttttcctgccagcgggagatcatatcacgatatcggtctttatcgtcctcattcagcttgttcgaattgtttttctcttcaagcgattctatgagtttttccattacctttttatcgttgcccgtcagattgtctttgttcaggatttcatcgccctgatcgaattcattatctgctttaggtttcgctttctcttgcgctgcttcgatctgtttggtttcatctacacgttgacggttcgcggtattctctttgtcaacctcagcctgtaacagtgcagggttttcctgcaatgctttcagttctttcttcttctcttcggtgatcttctcttcgagttctacctgattgcgaagttcttcaagatgcttggattgtgctttctgtgcttctgtctgttgcccgaaactatatgagaatgtaccctgcgtagccttaacctgatcgacgagcttagaacgctgttcaacaactttatcgttctgatcctggatctcttgctgtttcaacagaaccaaatcatctttatcaatctcaagaccgtatttctgtttatcgcgtagcgctgataccttcatcccgcgtccggcgttagtaatcgtttctgatccggtatattcgcccagagcatagattagattaccgataccttccgtgattgcggttttaatggtatcgcccagaattttaaacggttcgaggaacaagtttttcaatgatccgcccaaatccttcatattgaagttttgcagcccttcattgattttttctgcaagggctttaatatttccgaagtatgatccaaataactctttcgaggcttcaccctctgcgagaatatcctggaaccacttctgaataaccttgctcagaacgtcgatagcgaatacgatactaccgataatcaaagtccatttggcaaacttcgccagcgcttcgagagagtatccgataaagcgagacagaagaccagatgtattatccttgattgaacccagcaacgcaagaacgcgcttactgaatttcttctcgtctttatccttatcgcggatcttcttcttgtcccgatcgacctccggttcctcttccggtactggttcaggttccggcgcgggggctggtttcttttcagcgagttcgataaacttggtgattgcttctgcaatcgttccggtgtatgtttcgattttcgcaaatgggttatgctggttcgatacactgacggagttatcaacactggttgtgctgttgtctgttaatgatggtggacgcgctggcccaacaaaatcgggcaactgttcagcaagtggttgttgatcctgttcgtattgttcctggaagccagcgaatttctctttgaaacgatcctcaaaggatttcacactgtctttgatgtccagtgtattcagcgcggtttcaagggtgttatcattgatatcctttaactcgcgcatcgaatctttatctaacgttgcctggatcttccgaacagttggttgcgcctgtggttttggtggattctgcatccgacgacgttgttcttcgttaaaatatggattgctagccattatcattcaccgatgatgttaagccctttaatggttttcccctcatgcacaatatagacttcctggagtacgccacgttttacatcgtcatattcataacgatacaggcagttaattaattgaatacggttttcgtccgtcagttcgatcggcttcccgttgtcatacgcttctttaagcagtaatgccagatcatccagcattagggtcggtttgttgaagaccaatcgaaggttatcaaaagtatgttcatacttagcttcgctgattttcatatcatccagattaataccgatctctttcagtatcgccattgctttatcgtcattatgataatgcaggtgaatcaaaaggaattcggtttctgctgcggttaattcgcgcggttgaatctctttgatgatatactcaagcaactgcattgggtctttcattgctttaatctgggtgaaatgacgatagcccagacgggggatcgtaacctgttcaccagtaggcaacgtgactactttatttttgctgttcttgatgtttaaacgcgtaaccataaatttatcaagtgtgtttttcttctctttcatgatcgcctcaagtatcccgatatttactatttagtaaatagaatataaagggaggatgtctaatgtccagtaaagttataaaccgcgtcgtgtcggttaaattatatccaacatatgaaaagttcgctgataacgtctatcttgaattgttacctgcccttgtctcaatgagtgagaaaaccatcattaacggtacttctgaaacattgatgcagatctatgataaccagttaatctatcagttgacagagaaaccgattattcaggtatccttccagtataacgaaacgttagaacagcattactacggggttctgtattcgaatgtcgaaaccgatgatatgaaccgctctatactgcgcctaaacctttctccggtgcatacggtgtttcgtcgtaagttttcccgttcgttcagtaacaacgccgtacagacgattacagagtgcatgacggcactgtataatgatatgaagttgatcacgccgcctatcgacgcatcaaacgtgcgtattcctccggcttgcctgagcgggacgtatgaaaccgtgtttgattacatccgtgacaacgggcagagcgtagattcgtctgacttctgttatctgtgggaagatggttctggtatctttatgaaaagcaatacggagatcctcgcacaaaccccgttaaaggcttacaagttcaacgtaagtaacccgtttttaggtgacgctttggtattcactaaagcagaatacattacccataaggataacactaccctgttaggggatgcaagtttctttagtttctcgatgacggataaaaaactgtacagtgatatccttgcgagtaccgatattgaaaacgcatggatcaccatgaacaggaacgcggtatatgagaacaacttccagaacccagacaaacagggtcaaccgttccaggctgtgaagtgtcggacgttatccagttatgaaaaacgtattcggtttgatatcaatcagggtcgaatggatgttaaagtgggggcattgattgaggtgttaggggatgaatattcagggaagtatctgatcgttgaatgtatccgcgacgtatcaaaagatttccacctgcaaacattagaatgtgtacaggtggcagcggctactaacgacaccagcaaaaccagtgaggcttaggccgtagtttcttcatgatagcccatgaacaggtcgaacacgttgttcttgttctgtttacgggctttcttgatattctcgtagttctcgcgaggcatatcaatcatgaagcacttctgacgcgctgtagcgttctctgtgagcgcaaacagttcatcttcggtgtattccttgttaggattcagttcgacaataacacattgccatgtgtcaggatctgctgtctgctgcatctgcaccaggttagcgtttttcaatcccagattgtgcgccagcatttcatgaacgaattcacgatcgccgtcttcataacggagttcgttaccttcccaacggatcaggcggatagttttacttggttctgatttcataacgtggtttcctgctcataagttcgcgtaaacgtttcgtcggttcaggtgggtttttgatgatctcttgaatctgatcccacgtttccgccgacaccaatttcttttccatgataacgatattcgggttatcacagcattttccaaccataacacaacgcccacaattaaggcagattgtatccggtatcgttggagcattatcaaggaagcgaccgaaatcaatatctttcagcgcttccgcaacccgtgcttcaacggcttctttactcatatcaaccatttttcgcctcgttcatccaatcgcggaatttccacaatttgttctgtgctgcgatgtagctttcttcacggaaattagaagcgcaatagatcagagtcgggaactgaacttcgttattgcttggcttctcgtcaaacacatacacctgaatgttgttacgagttaaacgcggcgcgttcatgccagcaatcagagccagaaaatccgctttcttagttaagtgagccattgacataatcttttcctctttccgtatttcgtttcgatgtaggtaatgtaccattacattacccagaacacaagcattatttttcgatttcgtagcactcttcaacttcgatgtttaccagaggtacttcgatatcccatgaatccgcttgtgcatcgtatacggctttgtcttcgtcgttcagaggcagacaagtaacccaaccgtcagtaacgcgcatcacgcgcattttagaaaggctttcgagtgcgtccgctggcagtttttcaccaccgttacccagttgtgccaaacggtcttcatttaccagaacgattactttgccttcgagttctttagtgatttgcatgggatgttccttttgtctgtttcgtttcgatgtgtgtaatatacaaaaaagccccctacattgcaagaggcttctttagcaaaaagtgctatttaaaacagatctgcaaagataacgtgaatgtcatccggttcggtcttatcgcgtcgaatctttttgatgattggcaagaagaaactgtattccggttcgcccttcttacgcgttttcgatttctggagtccgtcaacttccatttcgacgatagcgccgatatagtcatctttgtttgccataatgtattcgcgatccagttcaccacgttcttctaacgggatgtacacgcggtgaataccgtcttcatcgtatcggtagtccgtatcagtcagaccggaacctgtgttcgttctggcttctcctgataagtcctcaaccacgaacccgccaaccttatgaggttctttggtgtgttcatacacgtcgatgattcgcagttcgatcggggttttgttcttcaacttcacctgatccgcaacgcgtgaatccttccatttgaaatcaacgtttttcaggattgaaccctctttaccgtcattgcggtaattgttgtaatcctttttcgcttccgcatagttctgcaccaggatagaaggaatcagcttaaccgatgttacaccagagccagccagcgcaccttccaggatagagaaacgatcgcaatatggttgaacactcggagcatcaccatagtacacttcatacggtacgatatcccagacaacataaacgatattgcgctgttcttcgtcgctgatagtgcctttcagggatttgtttacaatcccgttgccctcttcgcgtttcgcttccgcttgtgtctcgttctcggtagcttcccgcctaacatctgccacaaggtcagaaacagaatcgtcgtcatcgcccataaacccagcaagactaaatggaacgctgtttgaaggaacgacagcagttttttcagcagggacataaatcagttctccatcaagtacaacatcataacccagatattcacgaatctttttcagatccttgtccagattcaataaaccttcatactcattccccgcgcgggatgctttgcggatcttgtcttccagcagatcggacatacaacgcgcaccatcggctttaagctgcgagtaagcagggaagcgaatacgttttaaggctttctcactaaacggcgtagcgaggcattgaggctgttctggaatgagtttcttccatacgcggtttggtaacgttgtaccagcaccacattccagatcgcggttaatgatacggcgaagaacttcgcgatcattctcgttcaccgatgatacgatatccagcagacgatcacgggctgcattgcccgtatattttcgcgttgccaaatcagacatcaaatccgcgatagcattcgatagcggggttgtgcctggcttaccgtccacctgcggaaacttcttaatgtgaaacataatctgtttcgtgtacgtaatgcggaaaatctcttttagcagatcattacctgcattacgtttcaggatcgcttccttctctgaaattttcagagtcgaagcgagttcatttagaatctgtaagatcatgtaatttctcttcgatttcaaaccatgatttaactgactggtgaggcgaccacggggtttcacgttcaccacgcaacatatggaataacggcaactgactgatgacgttatgacattcgtttaagtttaccgcaagatcatcaacgaagcaaaccagacgattgccatatttggctttcgcttccaggtagcggtgtactttggtttcaccatgcccgacaaccatcacttctttgaatgcagaagggaacagcgtgttcaggttcgcaatacggttaaggcttgccgtaggagtggttcccagcgccgtgacagccacgaaatcatattgggctttcaggcggttgatcacaatcaacgcatcgtcatacgcgcttagatagcgaataaacgaactgttgttgtattcttccatgagaattttcgccagttggtgatcacacccgaagatttcggtcatatcgcggaacttttcatccgtaaccatatccagcgcgatatcggtcggcatgttgtgtttagacaaaaagaacggcaaccccgactgccattttacggcgatcccgtcaatgtcggtaagaataactggtttcaagatttaacctcataacgatcaaagaaaagggtacttttaaacgcttcaatatccgcaaggaatttgtcacgctcaaatgtacgataataatcaaattcgatgcacaacatatcatcgttcgtgacactgataccagtgatatcttgatgatatttctttgcctgttgcagaacgaacggatcaagatccgaacaatcgaaataaattacgtaacccatcatcaacccttgtacatataaacagcgtcgaagccaggaacatccatttcgactttatcgaacacaatatctttcagcttacatttttcaacgtagctgttgatcacgttcatgttgtttgcgccgatggtaacgtaatacacacccgctttgtagataacacccataatcagggtagaactcaaagcgccctgtgcgtggagtaatgccaacgggttaatcgcgcctttgaacaggaacgcgcattctactctttcatcataatctttataacctatcataacagatctctcaatcgggttaaatttcggacaaactcacgttcagtgagcacagtttcattcatcttattctttcccattgaatgagtcaaggtactttttccggttgcagccagcgcacggcggaaaccgtcattcaggaaaagagcattgtacgcgttttcaatcaggatttgatacgcttctgattcacggtgaatcggcatacccttccagtatagggtatgatcgcgataccatttctttttcttgcctttgaacttggcggctttaccaaccagcgtacacacatgcgcttgcatatctggattgctgaatttcagactttgtaaaaagccctccattgatgcacattctaccccgtcaaacgtaaacggatgcggggcgaagttgctcaatgcgcatgatgggtatgaatcaccactaccaatattcataataactctcttaacgtatggtctacatagaaattcattgattacatcaatctcttcggagattgttctttctgttttccccgtataccttcatacaccgactcgattaaaagatctttttcgaatgaccgtaacattatgaacaccacccgccccgcaagtgctggttttcagagtttcggctttacgcgcacccagaaccagagttttaacaggagtcacaggagcagcgataaccacaacagcagcccaacgtgcgccaacagctttatcagtacccaggtcgattacagcagaggtattcttaccagcagccagaacatacgcacgggcttcacgacgagtgttgaagcaaaccagttctttcatgttgtaagttttcataatgtcatcctcagtttcgtttcgatgtgtgtactttaccacactcacgattcagcgcaagcattattttgcataaaaacaaaaaagccgctacctttcggcaacggcttgatttttaatacttttcttcgggctggaacaccgcacgacacgcccacatagaggcttctttcagtcggtctttcgccttttggatttgatggatacgttcaagcatcgcatcgagttcttctgtagtgaatgaatcggtatctgataccgcgtaatcacttgaatactcttcatccagttctttgaagatttcgcccagggcaacttctgcggccttgatgcggtttactttgtcgatcttttctttcgaatggggcttatagccctgtacgtcttcaatcgccattatagactctctgtaaaggttcgggcgataacgtcgcgctgttgttcaggagtcagtgaattgaaacgcactgcatagccggacacacggatcgttaactgtgggtatttttctggatgcttcacagcatcttccagagtttcgcggcgcaacacgtttacgtttaagtgttgtccaccttccactttaacagtgggttgaaattcaatatcaacttcacgttttgcgaatggagcaacgcgagctttaccgatcactgaatccatttcgagggttttggataccaccacacgaacatcattaccttcttccaggtagattgtaccagtgtgtaaaccttctaaaatctgatatgctttcattgtattacctttctacgacataataacgtaacgggttgatatggaacgccagcattgcacgatccagcccgttagggtcagttacttcctgtttcagtttccacccgcaatacacgcgtaagcagaactgaacctttccgactttaagccacggtttgaagacataaagcccccatgccgaatcattccacatcaacagataaccgtgacgcgaaggatcggaaccaccttctgttttcgggttgcccttccaggcgaagtctgactgtgcttcacgccctaagacgtgataagcgaagttgtacgctttgttacgccacaaccagcctacacgttgcgcatacacacccagatcgcctaagtgataccggatgttagcccaacgccggatatgtccaccatcaccatcgatcgggttatcgaatgtttccatccaacggaaccctttaggtaagtgtccggtttcgtcactgtagaacggaaccacgaaaggagccagcagaatagccagaacacccgaaagaatatccaggggaaccagtacaagccagcttgcgtatttcaaaaagcgcatatgcttctccagaaaaaaggctatccgaagatagcctgttgattaacgaactgctttgatatacttatacgcttctgcgaactcttcttccagagcttcgttacagaacgggataccttctgctttaaatccaccagtgataaggtactggataaagaatacagaagaatctatagagatcaactgatggttcgtaggttcgatatcagttcgacgaacgatattgacgatcgaccagtcaaagaatcgtcgatgatattcgtgtttgctattcacctgcggtgatgcaaagaaaccatcaacagaatacgcatcgaacgctttacgatattctttatcgaaatcagtgatttcttcggtaaacagtttcatcaatttaccgttgatttctttttcagttgatgcagcgacgatttcgcgaatttttggggttaactcaaacagcttttgaagacctttcatatttttctcttttaaatttgtgggctggaagtttctttacttcaccccgcattccggggaacctattaccggataccaacagagcctatcgcatacgataaggttgcatattccgaaccatttaacggcattgcgctacgcacccgaattggagcaggtgaagggactcgaaccctcaacaatctggatggaaaccagatattctaccaattgaactacacctgcgtatttggtggcccctgctggacttgaaccagcaaccgcgcgattatgagtcacccgctctaaccaattaagctaaagggccggaatttttagaactgtttgcgatagatctcgcgaaccaacggatcaacatctttcgcgtacttacatacgtcttcgaactggacgatgtacgccatgacttcatcggcacgggatttaagtttaccctgatgcgcatcaatgatcattgctgtcattacgtcaatacgcgctggggcttccagaatttcgcctttgtcgaacagctttttggatttgctgacggtatcagcgataattgcttgaattgatttagccatttttagatctcgtagattgcctggattgctttgtaatgtgcggaaacgtattttgtttccttctcttttgcttctttttcggaaatgtaacccgcaaccagatcagggtcaggaacattcgccatgtgagcgcttggcagtggaatatatttacccaggattcgttctgccgcttctgctggaacgtctacgcctacagaaacaactttaccataaaaaggttgttccccgtgctggcgtacaccaaccacgataccagattcagatttgatttcggaaccctgcggacgcgcagtagcttcgatgatcacatattcgccggatgcttttactttcagttcagacatttctttactcattgttgttaaacactactttggaaaagtcgataaacgattctaactcttcccgtttaatttgttccacgacacagccatatttctgcaagcgtgaaatccattcatcattaccacgatcgtatttatcgagataatacaccgatgtaatcgccccgttagcaacataccattcgatatgtttcgcgcagttagggcaaggcgatgcagttgtgtaaagtgctgcgtctttgagtataacacctcttgtgtgcgcactcaatagcgctttcatttctgcatgaatttcgttatcgtttgaccatgctgaatgttcaggacgatcaaccgctttcagtttaccgtcatcattcaccatatgattgttgcatgagttgcaacgacaatcaaggtcaaccgtattattttcgccccacgcgacggcacgaccaccaatcgcgataatagcacctacacgattcgaaatacattgagaacgttgactccgatcgattgctctcagcatattcattactttgaatttcattaacggtcatccatatatttcagaatgtctttgatgaaatcgttatcagggttgacgatgtgatacgtagtacctgaacgtgtcaccacttcaacaaacgatttgttcgccggaatcgcgtattcaacaaccggacttgttgcaatgtcctgttgaggatcattatcaaccaacccaaacacacaaccataacgaagcatcgttggttcagtacagagccatgcctgatgaatctttctgattttgtcactcataatactgccgcccatgttacgaatttagttaccggattccactgaatcccgaactgttgttcaacgatgttacgttgactcagaatacccagaaggaaggagaactgaccatcgcggacaatcttcactgtataaccagcaggaattttatcagcaatgcgctggcctaactggttgagtttcagttgaagttcaacaggattctcaactttaacacgatcacccagttcaaccatcacattttcattttcacgaataaccataatattctcctttgtttgtgcgggtatcttatcacacccgcactcactgtcaactgttttttagaagtcgccgtaatcaacctggaaacatgggataccgttcattcgccacatcccgactggtgtatccctgtcgtccactgcaagaacaggataatacttatcgagaatcttttcaacaagtatttgctcttttacgtggaaatcgtgacgatgatcaccttcttctcgcatgtagataccatcgctcaggtcaacatcgtatccgatcaggcttgcagcggtatcatgtgcgcactgtgcagtaccctcacgcccagacacaacaacacaggcataaccagcggccttatacatcctgaacagttcttgaacaggagggttaggcggatcgttgatcacctttgtgaagtcatacgggctgcgttgtccaactttggtcagtgtcccgtcaacgtcgaagataacacatttcggcttgctcggatctgcatagctcatagccggaacccagccacggagtttacggtactgttcgaacatcgcccagacacgggaaacaggtagagcattcacaccgcgtttatggttgcgtttcaggagttctacgatatcggcatcaatccattcgatatggaaatcagcattgaactctttcgcgatctctcgccacacatcatgatctttttggtgtaaatgggtattgtgaacgataacgttcttcccactcgccagggcattacgaactgtatcttcttgcacacggcaaacaaacagttctttctcttcggtgaagcgatagccagtgagatcaccgccagcacagtaaagggttttgcggatatcgtcacgggaaacagtcagcgtgttccccagttgacgtgctttttctttcgcccatgtagttttcccgctacctggtacacctacagtaataaacagattcattacacaatctcatattcaatcagttctttgttatgctcattcgttagattgagccacatatcacggttccagtcattttcgatccagagaccttctttgtccttcttcgcatcataaacctttccttcggttatgtcacggaaaaatgacttgattattttgacttgcatttctcagggtatcccacggtacacagaatgttatccgtctggtctttctgacgcttaacgtcattcatccagctacggaagattaacgaatcgggatatgaaagggcaacgtatgggtttccgtcataaggcatgacaaggtattttttaccgtcaatctctcggacttctgcaaccactttccatttcacattaaccggattcaccttagcggggagtgtaggcaaaatcttttctggcggcttctccgcgcacccaaccaacagaacgcccagaacaagggctaacgttgcaattttcatttgtcgtactccgccatatactcttcgaaggacttgttgatcttgatttcgatcagtcctggttttttaaacagcagatctttacgtccggcatccttgaccaactgctgatccttacctttttgttcgacatagatcaccgtattggtgttgtttgtctctttgacttttttgatatcagcctgtaactctttgatatctttagccaattggtcattttcacttttcagtgtgattgtcatgtacaaaagccctgccaaagacagggctacaatgacaggccacaccaaagaagttaactttggaaaggctggtaatgtcatttatattcttccggtataaactgttcgtagttcttcgccattaatgcaacgatgttatcgaccagcttttgcttatcggtatcatcgaaataacgcatcataggcccgaagatgatacgaccgtcaggggttaagtcagcgctcagggcgatcgcgtagtctttgcgtgatttgcctttcgtgtcttcgattgcctggaatgcttttgcagtcagacgattgagactatcaaggaataacgtttcgaatgcgtcaattttcttgagtgcgtacatatcatcgaggaacatttgtttcaggtcatcgacggtattttcaacaatatttaagaacagatctttgttattgttgatgctatccttcgtgcggtgaaggtttacataccagttggttttcgctttcacaaaacctttatcagttttgatcacgtaaccctcgaaaccttctttcgtgtaggcttcggtaatgaacgcatccagatcggtgatttcgattttctcgcgctcaaccaggaacggacgtaatacaccatctgcgaagatatcctgataatcgacatattcgcccgtgtcgttattacggatgttcaggatcaccactgctggttcctgatagccaattacaatacggtttgtcggtgcgacgtattccatgttgactgtgaaaccatcgttaaccagttcggtcaggcgatcgaacaatgcgcggttagtctggatcacgctcatagcgtccatagcctgttcagattgaacggatgctttagacttaacacccagatagccggaatcacagaaggtggagatcagggaaccatcttccttaatcatcacatccactacggtttcaccaatcgtcacaggagaggctttcagtgcttcccatgcctttacctcagcatagttgaaaaacttctccatagggcgactggcgagttttacgggggtatccccatccattacaaacatgatgccgcgacattccagcgcaccaggttttaaccagtcggaatagctcgccatgcgatagttaaagatgcgaacattggtttgcatcacagttttttgatcaatgaagtagaagcattcgctttcgttacacagtttcatcaactggttgaataaggttttctgatttttggttagatttgtcatagtgctgtttgttccattcaggattgatttttcggatcatgtttatttcaaaatcatgatatgtgtcttcatcgtgtgttgtcacgataagatttacacgcttacgttttttgattgccatttccagacgtgcggttttcaaaatgttactggggtttgtttcccgccagtatttcgaattgcggtatgtgtctaaccgcttccacaaatcacgacattttccaacatacactatccgaccgtcgatttcaataaaatacacacaatgccggaattcgccacatttaacaaaactccgatctatccttttgtctgaacccagacgcaaaggaaatattacaccaaacgttacatcgtccattatatatccaacttattcacctttccggtcaacacattgacgcagtgagcaatataatcaccgtgacacggtaagggtttgcaactacagcctaaccgcttcccgtccagttctttcagttcgtcgattgtgatcacgccagttcgaatcaagttttggaaatacgggatgaagttaagaatgttttcaccccgtgttcccttgtaaaagggattgccgaacttcgtacctctttgaatatcgacatcccaatcacttttatacttgtttacgacgcgacaatcaagcgtatttttgtcgccattttgcataggcttcgtcgctgatctcagtgttgaggttgccaaccaggtaagaacttacttcaacctcttgcggggctacctgtacgttgtcagacttcaaccatttgttcatccacggatacgggttcggcgttggtttaaatggagactgcaagccaaccgcgcgcatacgctgatccgtcaggtgttcaatataggcgatcgtacttttcagggatacgccgtctacatcaccgatagagaacaggtgttcagcccattctttttcctgttcgtacacttccaggaaaatttgtgtcgcttcctcttcgtactggtaagcgatttccgccatttctgggtcatctttacccatctgccagagtcggatcttgctttgagtgcctttctggtgaagtgcttcatcacgggcaatcagacgcatgatcttcgcgttaccttccatcttgccttgttcggcaaagttgaatgtgaaggtaaacgacacgtagaagcggatcgcttccagagcgttgacagcgtgcatacacaggtacagagcaaccttacatttacgcatttgctctttgcgtttcttctcgtactctgcgatcgattcgtctgggtatccgtgggacgttaacatttcgattttgagcacaatatttttaagttcatgacattctgcgatcagatcatcgtagtattttgtcatggaagcagaacgtttcatgatcgcttcgttgcgcagaattttatcgaactctttcgacgggtcgatgtgtaaattgcgctgaatgtgtgtatagctgcggctatgaattgtttcactgaacgcccatgtttcgatccacgtttccattgagacatcggaagcgatagggaggaacgccaggttcgggccgcgcccctgaatggtatccagcagggtttgatattgcaggtttgaatcgaaaatgattttttcgtgttccggcattttcgcgtactgcatacggtcgatagacagatccacttcttccggtcgccagaagaatgacagttgtttttcagtcagggtttcgaatacacggtgtttctgttcttcgtatcgtgctacgcccgtatcctcaccaaagaacataggctgttctaagtgtttgtgatctgggtttgtgttcattacagttaacatggatttaccttattaaaaagcccccgaaggggcattgaatcaaattttgcaaccttcgcaatcttccgcttcttcctcacctgcaccgtcgcgggtgttgtggtagtacagcgttttgatgccgaaatagtttgcatacagcagatcttcaaggatgatttcagatttcactttaccatctgggaagttagccggatcatagtttgtgtttgcagagatagcctgatcaacaaacttctgcataaccgctacatgagacagataacctttgtttccacgttttgccattgtccagagataatcatagaagtcaatctgattattctggtttggtactacctgattgaatgaaccttctttcgaagatttcacactcacagggccgcgtgggggttcaatcccgttggttgagttacttacctgcgagctactttcacaaggcattaaagcagaaagcgttgagttacgcaagccatgttttttgatttcaccgcgtaaccattcccaatcgcagttatacacaggtgatgccagttcatcaacgtttttgcagtaccagtcaataggcaacagcccttgtgcatatttcgtttcgtggaacagtccacatgcaccgcgttcctgtgcgagttccatagaggcaaccagcaggttaaattgaaacgcttccatcaactcatgaacgtttccggcgtatgcttcggagtagtcacaatagttgcttgccagccatgatgcatagttggtgataccgacgcccagagaacggcgctgtttggctttcagagccgctgcaacagggtagttctggtaatccaacaggttatccagtgcgcgtactgcgatgcgtgtaagggctgggaattcgcttatatcggcattatcgagaacgatcgccataagcgtacacagtccaatttcgccagccagtttatcatcgtcatccagtggtgaagttgggatcgcgatttcacagcacaggttcgacatacgaaccggaacagagaaactaccctgctggtttacgtgatgactgttgaaaatgtagttgcgtccggtctgtgcgcgttcctgaacaagcaactggaacagatctaccgctttgatgcgtttcttgcgtaccgttgggtctttttcaagactggtatacagttcttcaaactcagtctgatccgcttgatagaacgcgtcatacaggcgatcgttcgcaacgtcagggctgaacagagtgatgtaatcgttattgattaaacgcttatacatcaaatcgttaagctgtacgccataatccaggtgacgaatacggttttcttcaacgccacggttatttttcagaaccaacaggttttcaacttcaagatgccagatcggataatacagggttgctgcaccaccacgaacaccgccctgggaacaggatttaaccgccgtctgaatgtgtttccagaacgggataacgcctgtatgtactgcttcaccaccacggatttttgaacccatagcgcgaatgtgtccggcgttgacaccaataccagcacgttgagagatatacttcacgatcgcggacgtaacagcgttcagagaacccagagaatcacccgattcgattacaacacaactggagaactgacgcgtaggagtacgcacacccgccataataggcgtaggcaatgacagtttacgatccgaaatcgcgttatagaagtcaaccacatgactgattttatcagcgtgtttttcgtcctgatgcagacacatcgcgatcagcatgaatgcatactgtggtgtttcgtagatgtcgccggacgtgcgatcctgcaacagatatttcccgatcaactgctgaacgccagcatacgaaaattcaaaatctttatcgtgattgattttcgattccagataatcaatctccgctggagtccattttgccaggatttctttatcgtatttcccagcgagaaccagattagcgatgtggtcgtagaacggaatcgggtcaaactgtccgtaaacggttttacgaagggcgaacatttcgaggttagccgctacatactgccagtcaggttcttttgcggagattcgatccgctgcatacttgatcgctacagcctggatctgtttggtagtcataccatcacgaagcaggtcaacgacactttcaaggaatgcgttaacatcaatatttcttccaatactcgcccaattaaggactttgaacagtttttctttttcgaacgtttgacttacgccagaagacttcactactgttttaatatcactcattatcttaccttgttaagaaaggggctttcgccccctttgtttatactgccatagctgcttttagcgagccgtggtgattatagtctttcaaatggatggagtcaaagaattcttgatccaaatcaagtaagctatttaccttcggcattacgagcgtcggaagtggaagcggtgcgcgttccggcttcaacaactctttcgcttgttctactgcgtttttgtagatatggacatcaccgccagtccaaaccagatcgcccacttcatacccgcaaatatcagcgataatatgcgtcaggagagcgtaggaggcgatattgaacggcaaccctaagaagacatcaactgaacgctgataccactgtagagacagtttgccgttgattacgacgaactggaagaaacagtgacacggacgcaacgccatatcatccagatcaacagggttccaggcagaaacgatgatcccgcgatcgtctggtgtggttttcagttgttcgatgatttttgcaatctgatcgacaccagtgtaaaaaccttcttcaccaaacgagcgccattgatgcccgtagatcggccccagataaccattcgtataacccagcgctttagcctgattttcgtagttatcgtcccagatcgtccgcttatcgctatcttcgccccacgtcattttacgcagtgtttccacgttggtagaaccggacaggaaccattgtaattcatgcttacacggtttgaagaatagctgtttgctggtagtcgctgggaaaccttctgcgaggttccaacgtgcttgcatcccgaagatgcgcagtgtaccaacaccagtacgatcggttgattccgtaccgtgtgttagaacggtgttgacgatatcaagatattgtttcattttatgcctttttcgtatgtcgatcgacgataatttttctgacgcgttcgtttgattcgatctgctgaattttgaaatcagtcagttcatatttcagaaccgcttcacagaattcaggaaccgtgaacgaaacatcacgtttaaaagctggtgcattgaaagtgtgatgtccgtaaatgtgcgtcacaaccacttcgtcaaccagtgtattattgattgcttccagaagcaaccccttaccgccaatgagacacacatcacgatctggatgcgttgctttcatcacgtcgattgcagcagacaacccgccgccgtggatgacataatcagcaatatcgccttttttggttttgaggaaactaccagaaccagacagaacacaatggattcgcccttgcaatttaccaggcagagaagtaaaagtgttcgcacccatgatcaggacgctatctgcggtttctgctttgaagttctgtaaatcctctttgcagtgtccccacggtaaaccctgttcataaccgaaagcatagtccatttcgtacatatcatgaccaacggcgaaaactgcttttactttgctcatagcgcgatccacattttgttgtcttcaatagtcacgatgtagcccatagcttcaaccatgacgcgcaatttgtctttacaggcttcattgtacccgcgaatcttttcaaattcaacagaaaagatactcaatccgttaacatgagcgttaatgattttggattccagatcgaacaccatcacatctaacggactccactcaacagaatgaagtttttcgcgggttaacagggttgtgtgctttggtagtttcattggggtacagtttgccatagccattgttccattttacgtaaatcttcctctaacggagtgaaaccaaaggattcttcgatcacaccgtcttcccatacatcaatttccagaatttccgttaccggagggtttgacatcacatgatcacgacacgcagccatagcggtcataatggaatttgttactgtcagggtatttccctgaaccgatacctgaataatcatactttcacccattctttatctttagtccatgcggttttcaaggtaaaacgctggcggtaatgcatacccaaacttgggggatgcagcgaattgataccttcgacggcgatccgcattgcttcgaacttctcgcgatcaataaactgccctggtagaactggcattctcacacagtcccattcgtaagtatcgctgatctctttactggcattaaccagaatttcagcaatgtcaaaatctgtaggtgcgaaccatcccagattgataaacacgcgtttttgcgtaccttctttcaggttttcaaagtgcgcccatgttggacaactcatagtattttcctcataaaaaaaggaactgcttttcaacagttcccagtataacacagtgatttagtatttcaagcgccaaagagcgattgcttcatcaactgcttttttaatttcttccggcgtgtctttgcgtccggctttaaccagggcagagagcatagaacgaatggttgcattcatctgtgacttctcacgatccatctgtgcctgatgcgccttatcaaccgctggggcttctttcttcgctgcctgtggtttcgtaggctgtgcgcctaactcgtccttagcttgcgtttcagtgcgtttctgttcggcttctttcttcacatgaggtgcggagaatttaccagccttgaagttatcacgcataccttccaggatcttacgggctgtgtaccagtcagcaacaccacgaagttgtttcagggtatcaaccagcaaaccgatacttgcgcctttgctatcctcgtcaatgtcgatatctttcaaccattcaacatgtttctgaccggagtgcatgaaatcaaagctgctgaaactccagaaacctttacggttgctgatctcgcgtttgaagtggaaagtcaaacccgcgccgttatcaaactcaccgtagttactgcggaatgttgcccccgcctgtttcagtgcgttgaaatagtcatctttattgatgcggttaacggtgcgttttggtttctcttccggcgctggtgctgctgcttgctgtgcggtacgtttaacaaaagatgctgaacgatgccccgctgcaaactctgcgttcatccggtcgattaccgctgcgatgccgcttgcgtctggtttcactttctgcatttctttgaaagtgtcgatgatcatatccagacatgcaccgtcttcatcttccagcatagtacctttcagacgttcagcaggtttgaatttgttcacagttgggtcaacaacatactggaacacatacgcgcctttacgcatgaatacgtgacggtagaagtgaactttatagtgtccaacatcaacaataacatcgttaccgctaaccttcgcacccaggatacgggcaaaggatgtcatgtagtccgcgcgtttgaacttgagatccttcttagtcgggctaaagatggattccagtttcttagtagggaacaggctttccggcgtgattttgtctgggttcttgccccattggtaatcacggcttgccattttgtgtttcttcgtaccaaccagaaccagagtattaactgatacgttacccagtgcggacgcgtccggcgctgctaaaccttgaccgttcggcggttgacaagagaaagagaagtcaaagaacgcatcaccagaggtgaaacgatatgtcgcgtgaacagtatgaccgcgaacttcgctgattgactgagtataggttgttggttgtccggtgaatttcgtgaagtattccgcgaactcttgcgcgttgaatttcgtgctgaaatagtttttcgcaaccacgaaatacgctgcaaatttttcttcccatgcttttttgtttgctgcgtgttctgcgcgaacatcactgtaagttttaccagcgctgtttgttttggttacaacgtcatacgcttggttgattttctgcatgagttcagtgctaccaccacggtcggggtgattgcgcagagaagcacgtttaaagagctttgacagttcagctttagattcgtcgccagtagcgcccaaaatcttcaatgcttcgctgtgtgacatttgttcgttaatcattttccgttcctcaaaataaaagcccatgtaactcagtacacgggcaactttaaggtatttatgttttgctgtcaatagattttttcgaggaaccacaccgaagatttattattcttgatgcgtgtcaattcaatggggttatctttgaatgcttcctcaacatctgccattgtaactacatgtttttcttccaatagttcattatggagataaaacctctccacttcgggagaggtctttaaatcaaattcacgttctaacatgagattgccatatctttgattgatggttttgtgaaccgtccaaccttagacatgatgatgtggcggtcgaagtcctgcggatcaagatcctggtgactgattacaataacgttaccatctacagaatccagcagggatttaatcgcgaatgaaccctctttatcaagtggtccatcaaacacttcatcaagtaccagcagagacagatccacgcctgatactttacttgtcacgtcacgccatgtgaacagaatagacaagttgatgcgagcgcgttcgccttgactgaatgacgcataactgaaatcatcgcgccccagtgatttgatcgattcgttgaactcgtcatctaaagtgaactgataatccgcacccaacagatccagataatatgctatctgtttgttgaagtacggaatatagcgcttaacaatgctggccttaacgccggaatctttcaacatatcagtaacaataccacgaatgtatttttccttgacgtagccttgtcgtttttcgttcagttctgcttcctgctgttgcaactgcttcacgggttcttcatcaatgactacttccgcgcttgcctgttccatgatcgcctgtgctcgtttagcgttggcaacttcgttttgcagtgtacctttcagggcttcatatttggttttcagggcattgagtgcgcgttgctgttgaagcaagtcattcatgatcccttgtaactcgtcttgtttggttttgatcagggttaaacgctgtgtacccgctttgatgttctctgcgatctccgccatacgctcaggagtgggtttaatcgcttgcttacaggccggacactcaccgcctttctgatacatcacctccagctttttaaactgctctacagtcattgagagccgcgaataaccgtcacggagtttgttgatatcttccgtccggtcttctccagtgatcaccgattccgcaatctccgcttgcaactgcataagctgtgctttgatgttctttgcggtttctacgtgactatcgtagatctctttgtatcgggcgttgttctggttcgctttcgctcgctgttcgtcaatgaagcgctgatgtgttgcgatctgctgctggatgtgattaccctgcattgagagtgtatccaactgctgattaacaccgcgaatgtatgacttgttcagcttatccatttcactgatgacggacagagacagcaaatcttcaaccagtttccggcgttctggggttttcagttccatgaatggggtgtaacccgctgtacccagaacgataacctgtttgaagcccacaaggttgatgttcagcatagattcaagctgtgcctgataatcacctgctgcggagtcttccggcaacttctcgccgttcttccagatctcgaacaccttcggcttttgtccgcgcacaactttgtacgagtctttcccgtattcgatttccagttcaaccaggcatttctttttgttgacgctgttcaccaactgcccgacttttagatcgcggaatgacttaccgaacagggcataggttaacgcctcgatcagtgtcgatttaccgccaccgtttttccccgtgatcagagttttctttgccgtatcaaaattcagttcgatcggggtgttcccgaccgacaaaatgttttgatacgtgattttcttaaagtttagtttcatttaaaatccgttcacataattcagtgatcatttgaacaactgatgaatcaatactatatgatagagtatcgtcgtccagtgtatcaagcatgaatattgaccatgttcgtgatgaatgccatgcacccttcatgatggtcaaacaaactgcgctggtttcccctgcttcgtcggatgtggaaatgatgtgtttcattcccaacatacgcaacaggtgagaatatcggggattcgccccgaaatattcatcataacggctatgcacttgacacctccgcgtagagttcgctgatcagcttattcacttcctctttttcatcgtcggtgatctgcatgttggcgatatactcagtgataagcccacgaacggttttgatttcaaagtcggtatcgacatctgaatctgttttaactttgtctatgatgttgatttcataggcaatttcttcgattttggtttggaactttgcaagcccctgatcaatttcactaacaatcagacgcaccgcgcagttgcggaactgttcaagatcaacatctttctgtgctggatacatgatccggcgatggtggcacacagggttagcgatgaaagtcaattcaggcttgcccgtaaacacatagaaaccgcgtgtttcgtcttcgtcgttcgcgctcatagtcagaggcgtaccgatataaaacacgttgtcaccctcgttagcgtggtgatagtgtccagagtaaacacgatcgtacttcttcaagaaatcaggttccagcccatgatcggctttgctgttcttgtagaaatagtaaccagacagttcgaagtgtcccaaacaaaagttagctttcgattgtttgatgtagtcaaaaatacgctggctgttttcctgacaaatccacgggattaggtcaatcgaatttccgccacctaaatcaaccgtggtcggttcgtcgatgacattaaagcattcgtattgacttagtatctcgcgtggcgcgttggggcgtattttgtccttaaattggcaatcgtggttgccgacaagaacatccagagtgatccccgcctcaatcagaagaggaaccagcttttcacgaacaaaattcattgtcgtttgtgtggttgcttttcgaacgtcgaagaagtcgccagcatggaagccgcgcgtgatcccgtgttctttgcaatactcgacgatctgtttgaataccgcatacaggttttcttcgttccaggggttatcctggcgaagtccggcatgggtatccccaattaaaacatagttcatataaacctcaaaacccccgaaggggtttatttgccgtatttttcagaagccatgatgaacaggtctttcaactgctggttcgaagtgatccacatcgtttcaatcagttcatcgttgtatggttgcttgagcatatcacgcatctttttgatcgcgtatacgtactgctctttgttaccttcgaagagtgcgttctctgcgtgtttatgcagtcgcttccattccgccttgttcttccgcatgaacttttgcgctttgcgtagggcttcctgttcaatgcgtgtacccttgatggagtccagttcttcttcacgaagatccagcgctgatttttggtgtacttcgtcgattacttcatgctgcacgttcatagtaagtgatctccatgatcattgtttcggcgtttattacatagtccagacgaccttctgttatctggaagtctggatctcgtacatctgtagggtcgatgataatcggaatccctaagctctgcaactctaatttcacaaggtaaggaagcagatcaatttcgtcgttagcatctgctaaaattttgttcaggtcaattttaattttcatagaaacatttccaatgttggcgattcgtccacaacctcgattttatctttgggttttttcgcggactcttcatactgattaagtttgtcatggatatcctgaatgaaagtttcatcggctatcgtggtcatatcagtatcatcgctgtcatagacatgttccaggaagtatttgtatttcttcgcgttctctttcttctcgtagagaatacgagttacaaacgcttgccagcaagccttgttgatgtaaccgtagacgtttgtatatttggtttcgtcaaagttatgaaggccggaaatcgttgccgaaattccatcatcgatcatatccattttccagtcttcggaataacggttgaagttgtatcgacgtgccaaaccgtgagcaatgttcataatcgcaataccgagttcatccggcatcttacgatcaccagtttcacggatttgctgtttccacttacacataactggatacagcttatcattatctgcataaatctttgtagtcattatattctccaaattgaatacattcattatagccgattgaatcaggtgtttcaaacctacttccaatctatattatttaataaaatcagcgcgaagcgcttccgtgagcgaagcgaaacggatagttagatctggttaaaaagtatacggaaatgtactgttttctctatatataaaatataaaaaatattaaaacgtacattcagtacatagacactcactacgttcgtgtccttcgcttcgctcagatttttgaaatgatctattgactttgaaaaagtgatcactataatcagtttcattcaacaacaacgaggtattgaaatgtcttcatttgcaagtatgttcaacctgaacagcttaatgagcaatgacgatgatcctgttgatgtgatgtgtatagatatttcaaacctttcggtagcaacgttgatgaacaacttcaagccgaaagaccagaatgacatcaaccaacaaattgttcgtcacatagtgcttgacaccattcgtcacaatgtggttaaattcaaaggcgagtaccctgaaattgttctagcctttgatgataacaagtattggcgcagaagtaaagcctggtactacaaaaagaaacgaaaaatggaacaagaagcatcggattgggactgggatcgtctgaatggtttccttcacccgacatacgatgaaatccgtgctaatctaccgtacaaaggtatccgcgttgacttcgcagaagccgatgacgtgatcggtgtagtgacgcgtaaagcggtatccgaaggtaaacgtgtcctgatcgtttctgctgatggtgactttgcagcccttcaaaaatatcagggtgtgcgtcagtggtcgccaacccaaaagaaatgggttacaccgaaatatggttcaccgcgtaacgatttgcgcatgaagatcattaagggcgataaaaaagatagtatcgcttgcattaaaatgcgaaatgactatattgttacgaaggttgaaggagaacgcgccccacaaatcagggctgctgaactcgaagcctggctggaagcggacgatccgaccgtgggtatgcccgaagagtgggcgatccgttacagagaaaacgaagaacttcgcgactttgattttattccgaaagatgttgcaacggcaatcgaagaagcgtataatgctccaaaaatcgggaacaaagcaaaaatggagaaatacttcatggaatgcaaacttacccgtatgtatgaaaaactaagtgacttttgaggtaacaaaatgagtgtagaattactgcaagaaaacccagacatcgctaaagcggttaaagaactgatcaaagaagcgtcgaacgtgaaaactcagatcgaacatttccagggttctttcaaagacatcaaatccaaagcgaaaacggattatggtatcgacggtaaaaccttcggcaagctgttcaaactgtatcacgaacaggcacgtaccgcgttcgaagaacagaacaacgaacttatcgaactgtacgatgtgatcgataaggcgtaatatgagcgaaatcggaaacaaaaccgaagtcggcttgtatatcgaaaatctggttgcctctgagggggcaacctacatggaagctacgttacaatggatggacgaaaacagcattgattatgctatgctgtccaaaacagtaccgaaagcgatcatcgacaagattagcgacgaagccattaaaaacaatctgctgcgtccttctgtggctaaagaccacgcgacgacgcaaacactggatgatttcatgtgaaatttaaaaccccgtttgacagttcagacgctaattcccgtttgaaaccgatcgcggtatacaaactgtatctggtgatgaaaaatcactttgctgggaagtatgacgcgatcaagtacaaatgggaaataaagatcactgaaaaagcgttcgaaaagagaagagataagtattttttcaaaaagttagccgaaaggtttacatttaaagaaatatatcttatacttctctccaacatggtagctaaccccgacttctgggtcggggatgtagacgaagatacgatcgtgttttatcgtcaatacataggcaagttgaggcgaattgataatattttcgtggacgatgtaaaaaacctgtatgaattttcccgcatgaaaggtattcccctctcaacggtgtttcagtatagcgtcaaatcatcaacctcgtatatcagcaaactcgtacagtctggggtgatttcttatgaatcattcttgatcctcgactcgtttttagacatcataaataaacacgatgaaatcgcaacggatttcgtctggaatgaatttagtaaaaaactaaacgcatacagaaaattagttgaaatcagtaacgaagaaatcgtaaaataccgaaacttaatgaaacaaactttaattaacttaaacgagaaataacatatgtcattctttaaacgtcaagatccaaccaaactgcaagaacaagtcgccgctctgaaaggttcatccggcttccagaaagatgaaaaagagtggaaactcggtgtcgatgcacagaaaaacggttctgcggtgatccgcttcctgcctaaccgatctgatgatgaactggcgttcgtgcgtatcgtcaaccattcattcaaaaagaataaccagtggttcatcgaaaactgcccgtctacccacggcgattacgatgcttgccctgtgtgtcagtatatctctgaaaacgatctgttcgaaaaagcgaaagtgaaaggcagcgaagccgaaaaaacactgggtatgatcggacgtaaacaatcgttctgggcgaacattctggtggttaaagatccaatgcacccggaaaacgaaggtaaggtgtttaagttccgcttcggtaaaaagatcatggataaaatcactgcggctatcgcggggaacccagatctggatgaaccaggtgttgctgtgacctgtccgtttggtggcgctaacttcaccctgaccgcgaagaaagtaggcgactggcctaactacgacgacagcaaatttggtgttcctggcccaatcaaaggcatcgaagacgaagcgcgtcagaaagaaatcttcgaaggtatgagcgatctgcgtccaatcactgctccagaccagttcaaaccaactgcggaactgaccgcgaagttcaccaaagtattcggtggtgctgcaatgggtgctggcgcaagcgctggtgcggatctggattcagaactgaactcatttgacaacgaactgaaaaacttcgataatggcaaccagtccaaaggtgctaaagaatctggtggcgtaagtcaactgaacgtaggcggaagcgtaccggaagatgataatacccctccgtttgatctggaaggtggttccggtgatgacgacctggataaactgctggatctgtaatgcttacgggggcgaaagcccccaatttgaaagtttgaggtagatatgaatttagaacaaaacgtatatgtagcgcatctgaacaacgttcgcaaatcctgggtaggtaaagtgccggaaaacatcaaagagattttccgtgcgatgcctcaagctgaacgctttgagcattacaaacggatcgacgaagcagtaagcgcagtacataccggattgattcacgacgctcgcgaagcgggtacgaaaatcacagaatccaaaagcaaagaattccttgacaatgcggcggatcgcgttgtagaatccctgattaacggcacttttgcctaattgaaaactataggttgaatatgaaattctctaaacaaacgatcgacatcctgaaaaacttctcccagatcaacccgtctgtaatgctgaaaaagggttcgttcattatgacgaaatccatcaacagcgtagtttacgcagaagcaacgatttctgacgtaattgacgaagatgtaggtatctacgatctgaactcattcctgaacatgctgaacgttgtaggcactgatgccgaagtaactcacgatctgtccactggcgaaatcgtcattcgtggtgagaaaatgaaaatcgttgagcgttcaagcgatccaaccacaatcgtacagcctaagaagcgtctggaaatgccagttgcggatctgattttccagattagcgcgaacgatttcgaaaaactgatcaaagcgtcacgcatgatgaaactgaccgacctgtctgttgagccaatcaacggcaagctggtaatcaccgcgaaaagtaaagaaagccagtcaaccttctctgtggaagtgggcgattacgaaggtgataacatgttcaacttcgatatgaagattgacaacatgcagttcatcaacagcgattacaaagttgaaatctcttctcgcggcgctgcgaaattctcgtccgaaaacggcgttgcgtatgtagtggtacttgaagcaaccagtcagttcaagtaagataaacaaagcagtacacaaggggcgttaagcccctttttgataatcaattgaaggtaatattatggaacttagtgaaaacgtacagttaatcgaaaccaaatacggcaaaatctcccagtctcccgaagaattcgcatgggatcagcgctatcgcccgacgacgatcgatgaatgcattctccctgctgctgataaagcgacgatgcgcggcttcatcaagtctggacgaatcgacaacatgactctggtttctgattccccaggtacgggtaaaacaacgctggcgctggttctggctaacgaagttgatgcggaagtgatgtttgtcaacggttccgattgtggtgtgaacttcatccgtaacgaactggatcgttacgcgtcctctatgacgcagaagaaaggcggtaaaatcattctgattgacgaattcgatcgcccaggcatggcagaagcacagaagcacatgcgtagctttatcgaagcgtacagcaagaacgttactgttatgatcaccgcgaacaacatcaacgggattcaccctgcgctgatctcccgctgtccggtagtcaagttcggttccccgtcgaaggaagaacgcgttgaactgatgaagcaaatgatcaaacgctgtttcggtatcctcgaaatcgagaaaatcgaatatgaccagcaggtgatcgccggattcgttaagaagcactacccagacgcgcgatccatcgttaaagctcttgggttctattctaagcgcggcaaaattgatgctggtattctgtctgagattgttggttcggatatcacaccagtaattgaggggcttaaagcgaagaacttcaaagcactgcgagccgaagcaatcaagtacgcgcctgagtatgaaactttcctggctaaacttctggatgcggtatacccgatcgtcaccaacgaatctaaggttgcactcattcaggcagtaggcgaaaacaacgcacagtacgggctggcagtgaacaaagagattcacctgcaatacctgttcatgggcttaatgcttaccctcgcgtgggaggcttaaaaatgtcactggctgcttttctcgatgaagaagaactgaacgaacatgaagcggcctggcgttctaaagactgggacaagatcgaagaacttgtgaaagagtacaccaaagacaaggaaaacaccttgtttatggtgctcgaagaactgaacaacgggaagacatcattacggatctctgcccttgattcatacgataagtttttcatcgacaatgcaatgagccagcatatcgaaacgctgattcctgcatacacgatgaatatgatcggttccggtttaccagaccaggcgcactttgattattacctgcatacggtgcgcaaaggtaagcggttcggggcgtgggctaaactcaccgaagataacgaaatgaaagttatccttcatgttctccaaaaacgatacggtgtaaatacatgtatagcaatggaatattacgaagaactcaaacagcttgaaaaactggacgagtggaagcggaaaaatatgaaagttgctttatctgtgttggctgatgttgtgaaaaataaaaccgaccagaaaaaggttgaacaactaataaagaaatggtgatgtatgaacatgctcgaaattaaactgtccagcgatgacagtttcctgaaaattcgcgaaacgctgacccgcatcgggatcgcaaataacaaaaagaaaatgttgtggcagtcttgccacatcctacagaaacaagggcgttattttatcgtacacttcaaagaactgttgaagctggacggtcgccaggttgacatgaccgaagatgacgaactgcgccgcaataacattgcgcgacttctggaagagtggggtatggtttccatccttacgccggatctgaaattctccgaagagaacaacttccgcgtactgactcacgcacaaaaagctgaatggactttgaaatacaagtaccggatcggtcattaatcaaaagcccttgcagaaatgcaggggctttgttatattggttgtacaccacttgtgaggactaaattatgaaaattcgtattgaagaaatcatcaaagctattgaatccggcgatcacttgatcaaccgtctgcatagcgaagacatcaaactgtctcttacttgcaatctctctgatctgcgcacctacgcatacgcgcgggatcacttccctaagttctatactcgcatcatggaagaatataccgtgctagttgaacaactaaatcggcctgacacccaacgctatcacaaattagcgcaacgctcgcttgatctgaccaagctggctggggtatcattcctgtcacgattaaacacggagaaagaaaaccgtaatgaatgaattttatctatccgttgagcaaatgggcgatcacatctacgagcgcttcattgactctgagggacgcgaacaggttcgcaaaacaaaatatgcgcctacaatgtttcaacacgctatggcgggtgtagactcgccatatcgcgacatttacggcaagacctgcatcaaaaagaacttcgaaagcatcaaagaagcaaaaaactggatgcagcgaatgaaagatgtaggcatggaagcgctaggcatggatgatttcaggctggcgtatatatccgatgcctacagaaaggaaatcgaatacgaccgcgacaagatccgcattgcttcacttgatatcgaagttaccgcgcctgaattccctgatccccgcgaagcaaaatatgctatcgacgcaatcacacactatgacagcgttgaagataaattctttgtgtacgatctggtcgagggcgggttagatgaatgggtagcgtcgaaagttgataccgaaaacgagatcagcgaagaagacttgaagaaaattgtttaccgttcattccagaccgaaaagtcgctgttgtcggcttatatcaaagactggaaagagcggacgcctgttattgttacgggctggaactcaaacaagttcgatattgcgtatatcatcacccgttacctgaacatcttcgggcaaaacgttgttcgtcatttcagcccgttcgggaaagtgactgcgaagacaacaaccgaccattacgggaacgaacaactgggctatgagatttacggcgttgctcaaatggatggaatggatctctataagaaattcagtttcaccccgcaaccgtcttactctctgggtgcgatcgctgagttcgaaacaggtaaaagcaaagttgattatgaaggttcgctgtctgaacttcgtcaagcggatcaccagaaatacatcacgtataacatcgttgacgttatccgcgtgttggatatcgacggtaaacgcaactttatcgaactggttctgtctgtagcatactacgcgaaaatcaacttccctggggttatgtcgccgcttaaaacgtgggacgcaatcatttacaactctctgcgtgaagagaagaaagtaatcccagaaaacaaacgccatactaaaacgccgtatgatggtgcatacgttaaagatccggttgtcgctccataccgttacattgtatcgttcgacttgaccagcctgtatccatctatcatccgacaggtgaatataagccctgagacaatcgctaacagctttgcagtgcgtccgatgcatgaatacatcaataagactgcgccgcgtcctagcgacgaatttagctgctctcctaacgggtggatgttccgacgcgatgttaaaggcgtgattccggtcgagatcaagaaagtatttgatcagcgtaaggcgtggaaaaaacgaatgatggcgggtgagcgaaatctcgaactgattaagcacgaactcgaacacctgacagacgcgcacaaccaaatgatcaaccctgatttcgagttctacgaagatttcagcgatgaatcaaaagctgtactgaaaacgctgtctaagcaaatgcttaaagccgtgaagaaagtgtgtgagaagaaaatcgcacaggcgaacaccgcacagcttaaccgtaaaatcagtatcaactccctttatggtgcgttgggtaacgaacatttccgttacttcgatattcgaaacgccagcgcgatcaccatgttcgggcagttggctattcagtggattgagcgtaaggttaacgaataccttaacgaactgtgcaacactacggattacgcatacgtgcgttactgtgacaccgactccatttatgtttgtatggacaacgtgatcgcgaaagtcggcggtgaaagtaagttcagggataacaaccattgggttgacttcctggataagttcagtaaagaacgcatggaacctatcattgataagggctaccgcgaactgtgcgagtacatgaacaacgtcgaacacctgatgtttatggatcgcgaaatcatttctggaccacctctgggatcgaaaggtctgggtagtttctggacggctaagaaacgatatgcggctaacgtatgggactccgaaggaacccgctacgagaagcctaaattaaagatcatgggaatggaaacccagcgaagcagtacaccgacagcggttaaaaagttcttgaaagaagcgatccgtcgcatcctgcaagaaggtgaagaatccttacacgaacacttcaaagtatttgaagaagagtataaggcgcttgactaccgagaaatagctggtgtatcatctgctaacaatatctcaaaatataatgatggtgctggcttcccaatcaaagggacaccaaaccacatcaaaggcgttctgttctttaaccgccatacgaagggtattcaaggaatcaccccgatcatggaaggtgaaaaggtgatggttctgccgttgcgagataaaaacccgtggcaagctgattgcatcgcatggcaatccggtacgcgtttaccaactgagatcgaagaagatattttgaagtgggtagactatggcggattatttgaaaaacatgtggttagcccgttgcaaaacatcacggaagcatgtaaaattgattacgaaaaacgcgcatccctgaacactctgttcggtgatgactggtaagacctgacggggcagaaatgccccatttatataaatttgtgaggaatatattatgcgtgtatataaaccggaaaaataaatgtctaataaagcactcctgaaaaaactgatcaaaaactcgaatagtcaatctgcgtcaattctgtctgaaagcgatgttttcaataacatcaccaaaactcgaacccgtgtaccgatcctgaacctggcgctgtccggcgctttcgatggtggtctgacttccggcttaactctgtttgctggcccgtcaaaacactttaaatcgaatctggggctggtgacggttgcggcgtacctcaaagcgaatgaggatgctgtgtgtctgttctacgattcggagaaaggcgtaactaagtcttacctgaaatcaatgggcgttgaccccgatcgtgtggtgtatactcgtatcacgacagttgagcaacttcgaaatgacgttgtgagccagcttaacgcgctggaacgtggcgacaaagtgatcattttcgtggactctgtaggcaacaccgcgagtaaaaaagaactggctgatgccctgtctgacaacgacaaacaggacatgacccgtgctaaagcacttaaaggtatgttccgtatggttacgccttacctggcggatctggatattccgatggtgtgtatctgtcacacatacgacacacaagaaatgtacagtaagaaagtcatttccggtggtactggtctgatgtattccgcagataccgcgatcatcctgggcaaacaacaggtgaaagaaggtacggaagttgtcggttatgacttcatcatgaacatcgagaaatctcgcttcgtgaaagagaaatccaaattcccgcttcatgttacctatgagggcggtatcagtatgttctctggtcttctggatctggctatggaaatgaacttcgttcagaccgtaacgaaaggctggcgcaaccgtgctttcctgaataccgagactggcgaactcgaagttgaagataagaaatggcgtgaaacggaaaccaactctattgagttctggaaacctctgttcactcaccagccattccttgatgcgattcaggaaaaataccgtattcctgacaaagagatcactgacggggcagcactcgaagatctttattctgacgatgaagtagaaccgtcaaataaatttgatttggatgacgatatccctgatgatgtggatatgtcagaagagtaataaacaactgggggctttgcccccttttaataggtgaatcatggacattgaacaaaaaacaaagaacattcttgatgaagcaatgcaggacgttattcaagaactgttgatcaacgatgaaaacgatgttgcacacttagtgtacatccataaagtgtattgggataacggcttgaaagtcgaattcagtacgccggacgaagataaagaaaaactgattccgctggttcacgatgcaatctacgcgcagatcaagcctaatctcccaaagcctgaaaagaccttatgggcggcgttgaaagtaaagctgtataatttctttcagatgttcgcaaatctggtttaagaggtaacaatgatcgtcgaaacaatattttcaaatctggtttttaatggtacgtattttgttcaggcgtggccccatttacgccgtgaatatttcgaagggaacgcgcaagttctctttgatttgatggataagcacgtacaggaattcaacagcattccttcacaaactgctttagaagtagctctggacaaaaagagcctgagtgatgtagtctacgaagacaccaaaaagatgatccgcagcatgaaaaatgcgccggaagatctggactggttgatgaaagaaacggaaacctattgtcgtgacaaggcaatgtatcgcgctctgtcccgtgcaattgagatccaggcgaatgctgaaaaacctgctggagaacgcaacaacaaaatccctgacgttggggcaattcctgacatcatggcggaagcgttagcgattagcttcgatagttcggtcggtcatgattacttcgaagactatgaaaaacgctggatgctttaccagtccaaagcgatgaagattgctttcaatatcccgatcctgaacgccattaccaaaggcggcgcagaacgtggaacattgaacatcttaatggctggtgttaacgttggtaaatctttggggctttgttctctcgctgctgattacctgcaatcaggtaaaaacgtcctgtatatcagtatggaaatggctgaacacgtttgttctaaacgtattgacgctaacctgcttgatgtgtcacttgacgatatcgacaacgggaacattacctatgcggactataagaaccgtatggaacgcctcaaacagtcgaaggtcggacgtttaatcgttaagcaatacccaacagcaggggcgaacgcgaaccacttcaaagcgctgattaaagagcttaaattgaagaagggtttcgtacctgatgtgattattgttgactacctggggatctgtgcttctacccgtgtacgcggggcggaaaacacatacatcctggttaaagcgattgccgaagaacttcgcggtttggctgttgaaacaaataccgtaatgtggactggtgcgcagactacccgcgccgcgtgggatgcttctgatatcagcatgggcgacgttgccgaatctgctggtcttccggctactgctgactttatgttagctgtgattgagaccgacgagttagctgatcagggcttgcagttgttcaagcagatcaaatcccgttacggcgataagaaccactttaaccacttcaaactcgaagtgcgtaagggtaatcaacgctggatggataccgacaacagcgatatcgggttcaaatctgattataaaggtcgtcagatgccgaaaacgcttgaagaagcacaaggtgctatggtaaaacaagctgaaactaaccgaagcagtaagttagccgaagtagcaaacagcacagacattcaattttaacggggcttcggccccctccaaaggtatagtgaaatgaaaaagattctcgttattgtgttcctgatcctcctgtctctgaaactggcagcaatcggggttatggcaaatgcttcctggtggcttgtgtttgcacctctgatcgtgatcggtgtgattaagctggctttctgggtgctgtttgttgtggcaatggcaaatgtattccctaaactgactctctggattgcaaaaaacgcaaaataatcctgattaggggttgacgggagttatgattgtgataatatgactcccgtagacaacgaaacggattaaaggagataccaaatgaacttactgaacaacccatacgacgaagtgatgaacccagaactggatttcagcgcgggttatttcgatgcagtagtgaacagcgtagtaaacagaggtttgctggttgaaatgctgaaaagtgggaaagcagatgttgaaggtagcgttgatttcctctggggcttcctcccaatcgacccagaattcaaactctgctgtaacgaagttcaggccaaaaacgttcttcggtatctaatcaacaaagcataaaattaagccccgaaaggggcttttttgtatctgtaggtattgcaatccttctcgaaaggtgataccttattctaaacaaacaaaggaggacatcatgaaacttgcaatcgcttttatcttactggttctaaacgcacttatgggctttccgttcccgtggttagtgcttctggctatcccgtttgcatggaacctgttcagaatcggtttagcgggttgtgttggtgtcctgatgcttatcatcggcgctatcggtggcaaagacgcttttatcggtgttctgaaagccatgaaagagggcgttaaagaaggtttagtgaaatgagtgatttattagatatgatacttccagacgaagaaccggagttcgatagtccgtatcgttccgaatggatcgtatcggttgatgataaaggctatgtcgatatcatgcgctggcctaatattcatcctggctatctggacgaaggtatcaatgcggaaatgctgggtatgcctgaacaggttgaagatcctgctggggtgtataagtggatttgcagcccgtgggaaacccgcgactgggaaagcaatattgttgatgactggggctttgatgtggtagaatctacccctctgttcttattaccggaaaaggtcaatggcaaagttaacgaaagcggaaacgaagcaacacaacaagataatggatctggtggagtctgataaggcgctaacctacgacgaaaagttattcattatcgaaaacttccatgaaggtgcatttacgaataactctgaactgggcgcgttctttaccccgatcggacttgctcgcgatttcaccattgatgcttgtaccagtggaagcgttgttgacctgtgcgcgggtatcggtgggctatccttcgcgatgcttcatatgatgatgtacgccaaaccgcgtgaaatcgtctgtgttgagttaaaccatacatactataagttgggtaagcgtatcgtaccggaagcgacctggattaacgcagacgcgttaacgacggagtttgatactatgtttgatatggcgatcagcaatccgcctttcggcaagataaagacatccgattttaagggtaagtatacgggcgcggaatttgaatataaagtgattgaacgtgcttcacagattgcccgtgcgggtacgttcattctcccgcagatgtccgcgaatttccgttactctggacggcgttatttccaacaggacgaatcaacgacaacatcgaaatgcaaaaagtttcttgatgaaactggccttgaaatgcaaccaggttgcggtattgataccggatactatctggaagaatggaaaggcgtgaagccgatgtgtgaagttgtctgtatggaattccctgaaccggagccagaacccgcgcaaaaccttttcactttcacaatagagtaaagactatgagcgatcaattaatcaaaaacatggatttaacctacagtgtgcgaatgattcgcctactgaaaaagccctggactgaatggacggcttacaagctgggtatcatcgacggtcaaggggaagtattgaaaaacccgaagacgaaggaagaactggaagcatattccccattccatcgctctgtgagacacatcaagcgccgtttaaacgcggttccttatatgtctgggttcatgaaccttacaagtgcttatgactcgttacggagccgctggaacctgaccgagcaagatcacgaagaaatcatgatgaacctcccagaacttcgcgaaagactcaacgaagaaatggttgcaggtgattcaggcggaagcgtggataacattgcttcgggtgtgactacaggcgcgatcacgaacaaagggccaaaggttctgggttctacgcgtccatataaacgcaaacgtaaaatcatgaagagtgaagaatgaaaccattaccgcctttgaattaccggatctgggttactgcgaacaattacacctggtttccgatccgtatcaagtacatgagcgacaccgcgatcgtgtacacgaacgaaagaaaaacttcatcgggtgtcgatattcctagaccttatccgttttataagatattctatgaatggaaaatcactttagacggcacagagaaagaagttagccgatagaggtaaacatgtatcttgatatagagttcgcaactcgtatcatgggatcattaccacaaagcgaaatcgttcgacggggtggagaattcagtatccattcccgttgtccgatttgtggcgactccatgaaggataagcacaaaaaacgtttctggatatttccgtcaaaacgaggcacacatatgatgtgtggttgttttaactgcaactacagcaagccgttttctgtgtttctgaaagactattacccggatgattatacggcgtatttgatggaatctttcaaggatcgtaaagatttaaaacagacgcacgaagaaccgccgaaggaagaaaagaaatatattcctgaattgcagttctgcgaacgtctggacacgttgccagaaaatcaccctatcgttaagtatgttgcaggtcgtcacatacctaaagacaaatatgatcgcctctggtttacgcgtcaatggcaacacctggttaactctgtgaatgcggacgcataccctttaccgaaggatgaaccacgtttggtgatccctatctttgatgaaaagggtaaaatcgagtcattccagggacgcgccttgcgtgacaatgccaacgcaaaatacatgacaatcaaagcatgtgaacactcaacgaaagtgtatggtcaagataccatcgatccgttgaaacctgtctacctgcttgaagggccgctggatagcctgtttgtagataatgctggtgcgattacgggcggacaaatggcgctgtccgatgttccgtataaaaatatgcgtgtctgggttcttgacaatgaagcgagacaccctgatactactcaccgccttttaaaattaattgaggctggcgaaaaggttgtgttgtgggacaaatgcccgtggccgtcaaaagatatcaacgaaatgataaaaacggacggcgcaactaaacttgaaatcatgcagtatttgaaagataatactgtttctggactcacggcgaaacttcggtttaagtcgtggaacaaatcaccgaaaaaatgagattgatatgactgataaaaacacttttacatcatgtgcgcacctggttaaccctgctgatctggaatttgttgataccgaatatcaaaaggttctggcacgtaacggcgatcctctgcaatcaatgctggatctgcaaaaccacgcacaacaaagcctgtctgataccctttcatgggttccgcgccctgataacctgaaaacgtgcggtgatatcttggactggctgaaactgcaagatgatgcgattgcagatgaaacccgcgaactttacaccgctctgggtggtatgtctcgcggtgcaaaagcggcttccggtgtatggaaaccgtggaaagcaaatcatcaagaactgcgtagccaggtattcgcagaaatgaaagaagaagacaaactggaaatcctgtttgaactgattgatcagtggcacttcttcatgtgtaagttcctcgcgctgggaatggatgcggaaaccatctacaagctgtatgctctgaaacaggcggaaaacctgcgtcgttgggcgaacaactactaatggaaatcgccgcgctacatgccgtatttgctttgtcttatatcgtctgcgcggtgataacgtatctcttcggttggtgcgttttccacgttaacggtgttgacagaaaagccgctttgatagtattatcattgctatggtttataggttttttctacgtcatctatgaggggcgaaaatgattgacaaatactatatcattgttacgaaagacaaagacggctttactattccatacgttgaaaacgggaaaacgccggaactgtttgcatcaccgcaacttgcaaaagataaattagattttatccgcaagtgctacgaaaccaaactgaactacacgccggatgaaccgcgtttcagtttcttccgcaaaaccgagcaactaccagcaaccgaagaacagaaaaaagagatgcgttggtttattgagaattcgaaaattcaaggggtattactcaaattatgagcgagttaacatttgatgatctgagtgacgatcagaagtccgcgcatgatcgcgttatccacaacatccagaacgccattcatacaactattacgggtggccctggtgttggtaaaacaacactggttaagtttgtctttaacactctgaaagggttggggattagcggtatttggttaactgccccaacacaccaggctaaaaacgtgttagcagcggctaccggaatggacgcaacaacgattcattctgcattgaagattagccctgtgactaacgaagaactgcgtgtgttcgaacagcagaaaggcaagaaagcgcctgatctgtctacctgtcgcgtgttcgttgttgaagaagtctcgatggttgatatggatctgttccgaatcatccggcgcagtattccaagcaacgctgttattctgggactgggtgataaagatcagatccgtccggtaaacgccgatggacgtgttgaactctccccgttctttgatgaagaaatctttgatgttatccgtatggataaaatcatgcgtcaggcagaagggaacccgattattcaggtttcacgcgctgtacgcgatggtaagatgctgaaaccgatgtctgtcggtgatctgggtgtgttccaacatgctaacgctgttgacttcctccgtcagtatttccgccgtgttaaaacgccggatgacttgatcgagaaccgcatgttcgcgtacactaacgacaacgtggacaagctgaacgcaacgatccgtaaacacctgtacaaaacaacagaaccgttcattctcgatgaagtgatcgtgatgcaggaaccgttagttcaggaaatgcggttgaacgggcaaatcttcaccgagattgtttataacaacaacgaaaaaatccgagttttagaaatcatcccgcgtcgggaagttatcaaggcggagaagtgcgacgagaagatcgaacttgaattctatcttctgaaaacggtatcgctcgaagaggaaaccgaagcacagattcaggttgttgttgatccggtgatgaaagaccgtctgggtaactatctggcttacgttgcgagcacttataagcgcatcaagcaacaaacagggtataaagccccgtggcattcgttctgggcgattaaaaacaagttccaggatgttaaacctcttccggtttgcacgtaccacaaatcgcaggggagcacgtatgaccatgcgtacatgtacacgcgcgatgcgtatgcgttcgcagattacgatctgtgtaagcagttaatctatgtgggcgtaacccgcgcacgttacaccgttgactatgtataaggggctacggcccctatgaggttattatgaaattgagtatcaaagttaccgacatccagcagattctgaacgcagtcgaaaagattcgcgaaaaagaccctcatgcaaattccatgtttgcaatgtacagcactatcgatcctgctgatgtgatccgtaagctgaaatacattgacagctacaataaaaatctgtattgccctaatgggccaagttattcatggggtaacgtcgcccttacagttgaacttacatatgaagaatatggtgttgttactatgattcttcgtgtcatgcgtaacttacgcgaaaacaaagacctgtggtacttaccatgaaaacagatatctctatgaaattccctcgtcttcatgcggatctgattgctgacctgattttaaagacaccccgcgagcaaatcccgttacacgttgattatgactatctgtgtgaattcgtggaagctgttgaaaatacaaagcgactcgaacagtcgatatataactgtggtttgcgtcaattcggtatgcagatgctgagtaacgaagaaatcagtgagtttgatatcactcccagagtagcccttgcgctggctggtttcatggaagaatataagaggattcgtaatgtcacatcttccagttgattacgtatgggactatgaaactgtaggcccgtcaccaaacggtaaactcgttgaactgtcttacgttccgtttatcgacgacccccacaacccgccaacattcgcggaactggtttcgcgggggagaaaatataagttcgatttgaaaaagcaaccggatcgcattgctgacaaatcaacgatcgattggtggaaacagcaaagcgaagaagcccgtacaatcctgaaaccgtcgccggaggatttggaactgtatgcaggacacagacaattcttcgaagacctgaaagcggacggtgtgagccgttggcaatcactcgattacgttcgcggccctgaattcgatcgcggtatcctggttgatgtcgtgcgtaagatggttggtaagatcgacatcttcgaagatatgccgaccgtgttctggaatagtcgcgatgtgcgtacatgtatcgaaaaccgcctgttaacgcgtgatgcttcgacctgtcctcttcggaaagggttgcttgatggttttgtgatgcataattcaattcacgattgcgcgaaagatgttttgatgatagtctattcattgagatatgcgctggggctggaagaacccccaagtgaagaagaaaccgatccattgagtctgccgaggaaaagatgattaaattatcatttgtgggtaaaactgtacatgcaaaaacactgaacgaagcaaaagcgcagatgtttgacattctcatgaaccccgcgttcgttaaagtcgaatacgatgaatatgttgttcagcctggcgatagcatgtattcaatcgctgaaaaattatacggttgtggtgagcgctggcagtctatcgctaagttgaaccgtaaaaccgttagtaatgcaagctatatccttccggggatggttctgaaattgcctcagttagtcgaattatgataaaaagcccttgcattcgtgcaggggctttgttattttgtagggactgaaacaaaagaggatgaaacatgtttggtgatttgaaagaaggtttgaacattttaatcggatttgcgatcattggtgtgattgcgtgtgtatccggtgcggtgtggttgtcttatcaggcgatcgtgtggttaggtgaatggcttcacattctggcacagtaaggggatattatgcgtttatgtttagttggtgtgggtttcggtcgtgcgttaactcaagggttaatcgactcaatccgctggattcaaccacgcgttgaactgtacgcaatgccgaaccggatcgaatactctggtccaacaccgtacaaaatgaaaccgtatcaagcaccacgcgttaaccgtgtgctgcaccgtcaatctgtaaacaggggtaagtgatgaaagaacttacgatcgtcgcagcagttctgattttcgtcatagtttcaatgattatcgtcagactgtaccagcacggagaagcgtttgaatggttcctagatcacgacaaagcgtttcgaaagcatttcgctggtgagttcatctttactcatgtaagcgtagcaagcggcacagtaacgtttgattttgacgggaaagggaaatcataccatatcgaactttcccttattgaagctaaacgcgtgtatgatgcgacacaaaacggcggtatgcgaaagatgcttataccactggcaaaataattttaatagcctcttgcattgcaagaggcttttttgtatattgcgcacataccaaaaggaggcaactatgacacgtattaacacaatcgatccttctcttctgctgaacgaacacctgatcgcagaactgcgcgaactccctcgcatccccaatgccgttttatccggtaaggcaaaaatcaacctgtcaaaaatccctgctgtgtatacgctgggaaccggacacgtaaccttcttttacaataagctgggataccttcgcgatcgtcatgttgcattacgtgctgaatacctcacgcgtaacggtaaagaatacatggacggtgcatacgaagatttcgatcttagtccgctgtcaaactccctgtttcatcgtcatttgtgcgcggactggcaaccaacgccggaatcagtgaaaatcaatgttgagcgtatccgtgaacgtttcgaactgcgcaaacgtgcttatcggttcggtactgagatcatcaacgacgaagcggcatgggatacgtattacgaaaaattaaaagaaaaatacgattttctttgatttgggtattgacccaaatttcgatatgcagtatattacacacatcgaaacgaaacagacaaaaggaacgcatcatgaaaaacttagaagccaaagtagttaaagtcctggttaagaacggtttcaacgaaaacgacgcggtagcaatggttgaaaagaatctgaatgatgcgttgaaagttagaccagaagcaaaacctgctaaactcgcagaggtgattgtatgcatcatgtaaaagtaagcatcaaggatatcacggtgggtgacaccgtgatccacgaagggaaaatgaagactgtcgggaaaaacgatatcaagcacgaccctttgtttggtgttctcctgttcggtgatagtttcaacttggggagaacttttattgaccgggttattttcccgaaatggtatcaagggaaacgggtttaacaaatagcactttttgctaaagacttcacgggatagctttgatatagttatcccatcgaaacgaaacagactttaggagattgccatgtatacttttgacgaactgaaagccgcagcacagcctttactggatgcgatgttcaaagcccgtaacggtggcgcattcgaaaacgaattctttgaaactgttttcgttctggaaaaaggccgtaagtatcatcgtattgtgcaggatactcgcaacaaacagactggtgaaatgttcgatcagcgttcagttgctggtttcctggacaatgacggcaatatcctgaaagccgcaggatggaaagcacctgctaagggtattcgcggtaatatcttcaacaacccagagaacgcgatcgaccgtagcggttacgttcgctatcttcgctaaaatcggggcttcggcccctttggaatattaaaatgaaactatcagcgaccgcaagttggtcaatcttcggactgatagccgcaggggttttattcttcgcatggcaatcaagagatccgaacaaagcggcgtatgaagccgcacaacgagtagtagaacaggatgcagaagcgcaacacgaagcaatgttaaaacaacgtcgtgatatgggctttgtggagactgtgagttacacaaacgcttttggtgatgtcaccacgcgctctgtaaacgtcttagggcgcacgaaagggacaatgctcaccatcagacgggaaggaaccggaaagctcgtagacgtgtgtttcagcgcgattacggacgattccaaacgcgaactattcgccccgtatttttctacgccagtctatgctaaatttgacggcggagaaacaaaagagtttagcgcaagcagaggaagtaccgaagatttcctgtgtattacttccccgcaacgtttccttttcaatatggatcgtgctaatgttatgcaagtccagttagtattcctggatcattactccaaagtgccggaagtgcatgaatggaacctgtcaacatataatgaggttgtgaagaaatgagcagacgcccaaagaacagcaaaaccgaaatgtttgcaacgtttgatgtaaacggaaagaacattgagggtaaaccatgcacgaactcaaagtttatgcatatcgccggattgcctggtatgagtgttaagacttcgtatgattgtcattacaacgaagaaaccacctctgtttatttgggcgaagaactcatggctgaacgcgtcatgcagtgtgtgcatttccctggcgaacgtccagaagtgaactgttttattgttggttatcataaaggtattgtaaatgagcaagtataaagttggcgatatgtacgccccgaaatctattttaatggctgtgtgtcaaatggcatcagaagccgatccgattcgtcgtatgtatgacgcgttgcgtaagaatccgatggacttcaattcaccacgccggatcagtatggtgtatgaagaaacagggattctttatcttgaaggtattcccgttcctgtaaagttcaacgatatgaaagggcttttcaatccggtatgggttgcaccagaaccggaaactgaaattacgatccacgtcaataaaggtgaggaagtaccgcgcgaaaattccgctgtagttctggataagtttttcaagaccgctcatagcgtcaaaaaacgaaccgttagcgacgtggttcaccacctgtccgcagaggttggggagatctccgaatgtctcgttcagcctcaacgcggcggtgatatcgtcgaagaaagcgttgatgcgatcgtgtgtgccctggatgtgatttacctgaaactgagtacaacccacgggacgacagaaatcgcgcaagtgatcaataaactgcttgataagaaattagataagtggtactctacttgtagttaatcaattacgaggatcggatcatgttggtttatcgcgttgaattgaaagcgtctatattatccaaatatgatggatggtgtaagcaattaggcccgtatacgggttgtgtcggtgatgaagacgatctctatgagtatctcgatattcatggaatcgagttcggtttaaacttcggtatctccgagactcgtcaccccgcaccatgcgaagaccttcgtttaatgcgtaacctcaaaaaacatggtaaaaattatcgtagctatattttcggcttctcttcattgcagaagttgtctaaatggttcgatagctgggagcggcaaattttggagaatcagggatatatttgtatggtgtacgaaactgatctcatgtttgcagggaacaaacaatgtgttttcagcaaagccgcaaccccgatccgttttattccattgtcagagatttattaatgccaacatatacctataaatgcaccaagtgcgaaaaagaattcccgaaaatgtccagcatcgcaagccgcgacgaaccgaaagattgtgattgcgggggcgaggcgaaacgaacggttgataagccgcagatggtgaaagacggattcccgtacaacaagtaaaccccgaaaggggttttctttttcatagaaccctatataatgcctgagaactaataaagaggtgaatatgagtttagatttcttaatggacgataacgagccgcagaaagcaccagaagccccagcaaagggcgctaaggtggatgaatcattctgcttgagcgaccgcgatcatattcgcaaacgtccgaatatgtacgtgggttcagtgaacaaagaagcccatgaacgttttatcatggggcaattccgcaaagtggaatacgtggaagggttggtgaaaatcatcaacgaaatcctggataactccatcgacgaagcgatccgaactgatttcaaatatgcgaacaaaatcgaagtgaagattgatcacaatctggtcactatttcggacaacggacgcggtattccacaagatgacgtgagaacgccagaagggaagattgttcctaaacctgttgcagcatggacaatggctaaatccggttctaacttcgatgacgaaaaccgcgtaacaatggggatgaacggtgtaggttctttcctgacaaactgttacagcgcgatctttatcggtgagacatccaacggtaaacgcaaagtcacgatcaactgtacggacggggcgcagaacatggattaccgcaccagcccgacgaaggagcaagggacaaccgttaagtttacccctgacttctctatcttcggcgtggacggtatcgacgaagagacaaaggaagtcatcaaagatcgccttatggcgcttgcagtggctttccctgccattaaattcacatataacggtgatatcctcccgaacaaattcgcgatgtatggcgcgatgtacggtgataaaacgattacccagacaaacaacaaaatcagtttcatcctggcgagcacagaagacggtttcaaacagaaatccttcgttaacggattggatacgaaaaacggcggtgttcatgttgacaccatgatcgacggtatctattccgaactcgaaccgatgatcaagaaaacacacgctatcgagatcccgaaagcccgtgtaaaagaatgcttgactttggttgtgtttttgcataacttcaatgcaccagcttttgatagtcagacgaaagaaaaactgactaacaccgctggggagttcaacaaccacgccggactgaactataaaaagatcgcgaaacagattatggatacttctgaaataatcactccgatcattgagtccgctctgattcgcaaacaggccgcagaagccgcagccattaccaaagcgaagaagaaagctaaaaaggcgaaggttgcaaaacatgttccggcatcagggatcgacactgacggggtagaaaccactttgtttctgaccgagggcgattccgccgtggggcagtttatcgagtgcagaaacgaagagacacaaggcgcatttccgctacgtggtaaaccgttgaacacctggggaatgagtaacttagaagtgctcaaaaacaaagaattgtctgaactcatggcgatcctgaatctccatccaggcgactcttccgaaatgacttacgacaacatcgggatcatggtcgatgctgacgttgacgggggcgatattctcaccctactgattgcgttctttagccgctggcctgagttgttcgagaagaaaaagatccgttatatccgcacaccgattatcattgcgaaagtcggtaaagatgaaaaatggttctactcccttgaagatttcgcaccgttccgcgataaggcgaaagaggtacgatatatcaaagggctgggttctttacgtaaagaagattacgatcgggtgttgggcgaccagttaaaatacgatacaatcgtactgggcgacgaatacaaagacgttctggaactgtgtttcggtgatgaatccgatccgcgtaaagactgggtgaacggaaaacataaattttcggtgaaatgatggaaagaagtattaaagacgttgtgcaggtagaagggcttacgtttgccctttacacaatttattctcgtgcgatcccgcacctggtagacgggttcaaacccgttcaccgtttcttcgtgcattccgcagcgaaaggcggtacaggcttccagaaagtagcctctatcgctggcggtgttgcaatgtatggttatcaccacggggaaacatccgttgaagaggcattgtctcttatggcggcgcactggtgcaataacatcccgctttttgaccgcgatgggttctttggttcccgtctggttaaaaagccaggcgcaccgcgctacattaaatgtaagctgtctccgctgttcaaggctatctacatggacgaggatttaacaattccgcatgaagatcctgaacacgtaccgccagcctattacctgccaatcattccgatggtactggttaacgggttcagcgggatcgcgaaagcatacgctaccaacattccaccacacgatccgatttcggttctgaatggatgtgttagttacctgaacgggaaagatttcacactggatctgaaatacccgcatttcaaaggtgacattgaaaacggtacgatttacggcaagtatgaactccagggtaaaaccaaactggtgatcacagagattccggtcaagtacgatcgcgtgaaatatatctctattctggataagctggaagagaaagggtatatcgtaagctacaaggatctatcgaaagaagatttccgctacgaaatcaccctgaaacgtgagtacacaaacgggcttacccgtgagaagatcctgaaagatttcggattgattgagaactcaaacccgaacatcaacgttatctttaacgggaaactgcattcatacgagcgtcctgaaacgttgctgaaagacttcgttgatatccgtattggtgtttaccaacagcgtattgataaacgcatccaggagactaaggaagcgttagataaggcgctggcgaaggttgacttcattgaccagatgatcgcacagcctgacgcgttgaaggggcttagtcgcagcgaggcggttaaacttgtctctacgtggacgggttgcgagaaccacgccgaaatcctggttgcgatgaacatctaccatttaaccacggatgaacgtcaaaagctggaagacgaagcgaacgaactgcgtaagcaactgaaatactgggaagaaacgaccccgaaaactgaatatcttaatgatttgaaagaactttcgaagaaattgaaataatttacaaaagcctcttgcgttgcgggaggcttttttgttatagtgtcctcactgatttggggaggatataaaaatgttcaaaactcgtagcgacatggaaataaccatttgggccaaaagcatcatggcgaagcatggtttatctcattggtctttcaaaattaacggacgtttcaagcgtactctgggacaatgcagctacggtcgcaagttgatcgagttgagccgttctcacgttaaggaagatatctacgaaaacgttttagatactctcatgcacgaaattgctcatgctctgaccgaaggggctggacacgggatcgtttggcaacgcaaagctatcgagttgggcgcacagcctacaccatgcaaaagccgtatccgtgagaaatcagtaattcaggaaagcgaaaaagacgtatacgcatttttcctgaaaactccgaacggtgaagtttatcagtgcaatatgacagaaaagatgtacaatgagatccaggaaggtaaacgcaacattgcaaacatctatatttcaagaaacaaacgagcaaccaaagggcgcttagtagcgcgtaaattgacaccagaacaatatgcagaggcgattcaatgaaaccatatgatgcaccaaaaacgggaaaatatattacaatagctgtgctgtgtactattgcaatatgttttgtaactgctatcgtggtcggtatcattgatatgaaagaccgcgaacgtcagaagcaacaggtttacgaataccttaacaggatgtgcaaacctattgaatacgggcttgatcaaaagcctgtgaaatattcttgtgacgacataatctttaacaccaagtgagatataaacaatgaaattacgtcagttagcaccgcaaaccattcacactacgggcttcgataaaggcgaacgcacgaagtttaaaatggctaccagtgcgaaaacgttcaaaatcctgtcatcaaccatctacaaatacaagatccgcgcaatcattcgcgagatctcctgtaacgccattgatggtcacatggtagcgggtaacatgaatccgttcgatgttcagttaccaactgttctcgatccgcgtttcatcgtccgtgattatggcacggggttaagtgactggatggttaaagaggtgtttaccacctacttcgaatcaaccaaaaccgacaccgacgaactgatcggggcgctgggactgggtagtaaatccccgttctgctacaccgaaacattcactatcgaatccatccaggacggcgttaaacgcgcgtacacggcttacatggataatggtgaacctttcgttgaccaaatctacgaaatcgaaacagacgaacctaacggcgttcaaatcactgttcctgtgaaagtcgaagatatcgcagagtgggaacgtgaagcagcgcgtgtttacgaaccattcacgggtatccgtccgcgctttatcggtgttcaggttgatgtcaactggcaaccaaaagaagcagacgaacgcgggatcatccgttataagtccatcaactattccggcgtatacgcgcgtatgggtaacatttgctacccaatcgacatggatatgttcgaaaactcgctgttctattgctaccgtaacagcaattacgcttatattctggatttccctctgggatcgctggacttcatgccgtcgcgtgaagagttgagccttgataaagtcaccaaaaaagtaatcctggatcgactggaaaagatcaacaaacgctatgacgaagaattagttgcagagttcgacagacaaaaaacaacccgcgataaactcgtatggttcaacaatctgcctagtttgttacagacatttgtaacccgcgataaccgtttccgtgtgggtaaaaactcactggctgaaatcctgacgcatatcaaaagtcctgagactgcaaccggaaaatacgtctggggcttttgggctaacccatatgacgggaaagaatgtgtatatgagcgcgttggatctggacgccgttatgagacatacaaagcggaaaccaccaaacgccaggacgttatgcgcattatccaaccgtggcgacagaagaaactgttcattgttgaaaacgacaatgaagcgcgttcactccgtccatacctgatcggttactgcatgttgcacggttcggatcgtatcagtttcgtaaccaaagagattaatagcgatcctgttcaggacttgatcagaactgggtatttcgacgaatccgaaattgtcacactgaaaaccagtgaattaaccaaagaatttgacgtgtacacggaagatcgcaagcgctggaaagcaacgcgtgaatcatcttctggtgattgtgaatcgcgcccgaaaacgcctacagcatatcattacttcctggatgatcggggcaacttacagaaaaatgatctgtacctgaccaaagcacagttcgtgaatctggatgaaatgtacgctatgcgcctgtacgggattgatgaatatagccgactggatggcgaagcaccgaactattctctgggtagcatcgccagcagtatgatgaccatgttaacggttacagggctgaaagatgtgatggttctgcgaaactctctgtggagtcgcattccagatagcaacatgaaatgtcttgatgattatctggtaaaacgttttgcagacgcagcgaagaagatgaaacctaactggttccctgcatggatttcatcaaaccacggaagcgagatccgaaccctgcgtgattctatgggtgtaacccttgatcgcatggttaaaaaccgttacaatccagaattgtatttgttgcttgattatcttgatggtaagttcacctacgatactatcgagggcaaaaacaaatcaaaaactgtggtgcgtaaccccttacttcgtgaaatgtcaacgaagtattataaaatgcggaaagatatgaaagaacgcgttgatactgcttacgatttatttgcagaacgcaacccatcaatccattacatgttgctgcattcgtcttattctacattccgcagtatgtttaatgacgaaaaaattacgatggatttggtcaaccttatacggtggaaataatgagaaacgttaagatccttgatgatgtacaaaagaaagcagtctatgagggctttctgaccagcgcgaacaaaaccgcactggctaaacaatttggtgtaagcgcccgaaccatcgggcgcgttattaccgaacaacacgctaagtataatacggaagcatcaaaaccaattccgcaaacagatgtcaaatctaaaatgattggttctgaatcgtttattactctggtactggacggtaagatcatcacagcggattcgtcgcaccctaacttcgaaaaagcacacgctttaatggttaagggcgatatcgagggagttgctaccctgttggacacaacgcaagcgttgaagatttacagcaaaggcaacattaaaatcatcgggcataaagtcctgtacaaagatatcgtgtttgatagcggtatcacgcaacgtatcgttcgcgaaatgtacaacgatcgcccatatgagcacctggtgaacttcttcgagaagttgatggaaaacccttcacgcgatgctgtgtatcagctttacgggttcatggtgcataacgatatcgaactggcagatgatggagatttctacgcgtggaaacgtgttcgtgaagacttccgcgatctggcttccggtaagttcgataactcccctggtgttgtggttgaaatgccacgtaaccaggtagacgagaataaaaaccgaacctgttcatgtggtttgcatgttgccgcaaaatcgtacctgcctcactatggcggaggacgtgggcgagtcattcaggttaaggttaatcctcgcgatgttgtagcaatcccaacagattacgacaacgctaagatgcgcgtatgtcgttatcaggtgatgcgtgatgtaactgtgggattcagtcactactaaccccaaaacagcgcctggagcgattcaggcgcggaggattcgattatgaaattcctacagagcattcctgactactggcagaacttgagcggggcagaaacagccatcaaaaccgctaaagaaatctggaacggaggcaacgttaccgctggacgtacagaagacggcgaacagacatatttcaaaaaccttacggtattatcgcaacagcccttgcatttaatctgggttatgttatgctggtaatcgcaacggttcagaagtgggtagagataccgatgaaatggatcgggacgttgttgattcgcttagttcgcttagtgttcggcgcaacgatcttgattttgtcatgccctatcttcttgctggtactgacaatgaatatgaaaactggtgtaaacaccaaattcggaaataaactggtaaagaaaaatgaaaagaattctgacaagacttgacatccacaaatacgctgttaagataggtgacatgaagcgcggtgacttcaccaagttcgaaggggttgacctgaaagaacacggcttctacctggtagttgatgataaaacgggtaaggtagtattccgattctacgtagccccaaatcaacgccgtaagactggcgcaaaccgtactctgttacgtatcaaacgccgcgaacacgaaccatcagcgatggtggccttgctggatagtgcttctctgtacttcgttgcacacgataagattaaaaacctctttggtttctcaaatcttactggtacaatagcggaaagcgcgattcagatgcggttcggggatggtgagaactatactgaatacaaccgcgcactaaatgatctgtttgactttgaattccaaccatactaattgagataatgaatatgaaactgttttccaaaatccgttctgtagacgaaatcgtagcaacttttgacaaaaccctgaccgaactcgaagcgcgtattgctcacgataacgaacaggtcgcacaggtagcagcagaccgcaaagcagcggaagaagaacatcagcgtaagctggctgaactggctaccaaagaaagcgatcataccgcaagcgcaacacgcgccggacgtatcgcggataaaatccgcaaactgctggattaattatctaaaatggggctgaaaagccccaataaggaaaataatatatgtttgtaatttcttcgtactatgattcacgtcaacgagtatcgttgtcttctatttccaaagcaccaaaagatatagatgacttcggattgcttaactttgtcaaaaaagaaatcgaccgcgttgttccagaaaaatacagaattgttaaaggatctgatagcttaactatcgtaaaactgtatggcgaagtcagtattcaacatcatgtgccattatatcctcgatgaacaacctggtagcgaaacatgatttcaaccgcgcttctactcaccgcgatcgcaagcgagcacttaaagaagcaaaacgtaagcagaaacataaaggtaagtgtgatgaaaaccgctttgattattcttgaggaaatcccagaaaacacggggctgtatctcgttgaagccgacgaagatatcattgaaatcctcgaaaccgctcacggacattatgtgaacggatgcaacaataccccagaacaggatcacgctgtcaatatcgttaacctcatgttagggccgcgtacagatgacaacctgaaatgggcgagcgaatccaacgttcctcatgagtatgtcgggatgtattatcagtgcaacgttgacgataaagcgccactgataccggaaaaacagatcgatttagtagttcgaacaggtttcttcttatgagttcacaaattctgttcagcaaagaagatccattaggcacagattcatcggtgcagcgcttattctggcacatggattatacaaaaaatcgttgtcgtaacccaaacaatacatggggaagcaacgaagacattgataaagcaaaaatttatcctcgcggaaaagcatactggaaaatttttgatatccatcttcataaagttatgaaagattcgaacgcatgataaaaagcccttgacttcggttgagggcttttgttatattggctttgtcgaaacgaaaccactaaggagattcaccatgactaacctgactaaagttaccgcgacatacttcatttcttctggcgctaaaaatgctatgtacaccctgcgtgtagagcgtcgtggaggtgaatttacttctgataactatatctgcaacctgtctactgacccagataaagcggaagcgaaagcgcgtgaatacttcgatcgcatggtggatcgtcttaaccagaccgatactttccagatggtgttccagggcttcgcagatttcgatctgttcgaacgtcgcggtaaactgtctgtacaggataccgaaaatctggaactgttggagaagggcatcatgccaatcggcaagcgtaaaggtgaagtgattgctgatatgccgatgtatactattctgtggtgggctgatcagtgcaaagaaaacggcaacgatagcccagtatttcaggctatttgctcttactgcatgggcgtagcgctggagaaggattatatcgctaaacgtgaagagatccgcgcagaatgggaagcagagcgccaggcgaagatcgcagcagcgcaacacatcggggaaatcggtaagcgtatggaaatgagcggggttgttgagaaagtgatttctctcggatatacccaagtttcttattacaccgaagtggaacgtttcatgaccaaaatcaacgtagatggtaacgtggttatctactacggtaacaaaattgttgaagagggtgatgtgattcgcttcaaagcgacacctaaacttcacaacgaatacaaagaagttaaacaaaccattgttcagcgagtaaaggtattataatgacatacgaagaaatgcttaatgaagtgtgcgcgggtaaaaccgcgtaccgtccaattaacccagatatgatcgtgtttcgtgaaggggatacgatcattcgacgttctcaccgcaaggttgagattaaccaggtattcattgcgagcgtagaagaacagaaagcgactgattgggatattgttgcagaagaagatcatcatgacgggcttgacctggttttcgttattgaagatcacccgctgggggttcgtccgtacatttaccacaatcaattcagaggcgaagtgattctatcatgacacacgacgaagccatgaaagccgctacacgcggttttaaagtcgcccctgtgggtaaggctgggttctttgtatatcacagcgtagaggctggtttccggcgaattacgatagggaacgttggatactggaacgatgaatatgttccgacaccttacgaacttatgcgcgtatgggacatatacgataaaagcccgatgacgaaagtaaaagatttcatcaatcgggctttgagtagtttgaaactgaaattatcatcgaatcctgcctaaaattcttgcggcctgattgcacacgatcattaacttcgtatcgacgacttcgggcttctgtatataccattccattagaatcgatccagaataatagttttcgagattgaaataaggacaactaaaggtatatgctaccggaacaaggtcttttgttggaagatacgggcttgcaatatctgagatatagtatagcccgtttatatgtctattatactcttccgatgtcttgtctataggatagccacccagatttttcgggttaatctgttgcggtaacttcccttcatacgcaattatatcaacaaaataattgacattcttaggtctgaaaccaaagattgccgaaaaatccgcacccgtagttaaatgcactatgtttaactgttcgatggatgcggattcaaacttttttgccttttcaatatccatcgtcggcacgtctataacgcttgaagatgttttccagactgaaaataagtcatcccacttgtaccatgttacaaacataatgaaaatagtgacgataagaaccaatttaatgaataactgtttccatgttttgaccgccatgatgaacgatattacccgttcaagcaccgccaatttatcttgtaatagcgacatgtttaatcctcaagttcggggatgccgacccccgaacatatttaggaatttacttaacgttgagtaaccaaaccagaacggttttgacctacacgggcgtttagatagtcataccatctggtcgcctgagaagaaacaacctgatattgacgatatccatcatgtatacgtccgttgttgtcaaaatcgaatacaccgccgtcatccatagtaagacgtaggttgacagcaggaccgttttggatggtgattacgctaatatccgggcttgattgtgctgcaactacagtaccgaatgcgttgccgttaaaactacccccgaccgcaggatagccagaaggttttgaatatggtgaataccaaccaaccccccactgaccacgataacgggcgttgttatagtaacgctcatacaccgtaaagttgatgttataaacggactgattcgccatttgtgacatccagaagggtaaaccgattcgaacggcattaccagcagcagacatccatcgttgtcctgtttcgccgaccgcagacgatccgatccacccaggaactcctacaatagccataaaatacctcatgaaagaggggcaattaagcccctaatttgttttcgattacttccagacgttcgcggatttcattgattgcgttcaccagaagcgcgttaattgcagacggggagatcgtcaacataccagtatcgcggtcttcgcgtactgcttccggtaataccttttcgacatcctgagcaacaagaccggattcacgatgatatacgatatcgtctgcatccttagattgtttatcgtagatataacctttaagctgttcgacttttcttaatgaatctttcaattcaacaagattagatttcagtcgaatatccgaacgaatataaacatcgttaaagttaccgttcccttctgcatatacaccacggttagtatacacgttagcatcggtaagcatcagtgatgtgcctaaacgatagttatggaatgttacaacttcatcgttgctaccaaatccgatatacataccgttattacctgctttttgaataagtaggtaacatgacgagttaaccgcagggccatttaataccattgctggcccttcaaccccttcgacatatgttcttttatatgatgaagtattaattgatgtccaacgcatgatacgctgactgtttgcgtaagcatccaaaacaccgtcaccttcctgtcggaatccggtatcgtcatcacccaaacaaatagcgtttgtgcctaaaccgttcagagtaccacaaccaagaccactgttaaaccttgcggaaccaggaacaacaagaccttgagagccgaccgttaactgtccgttactgttgtcgacctggaaaggtcgatgcccattccaaccaccatacggatctcccgaattagtcaacaggaaatatgtgttcgcaccatcgtttcgaataaagaacccatagtttccagcaaccgcgcggaattgaccaccgccaccaggagatgtactttgaacctccgcacgggcgcgaacataaccatcggttgaaacctgtaattcctcttcttggtcagtagaacctgttgccagtctccacaaaccaccctgaacagtttcatgccagataatgtctccgttaccgccacggaactgacgcaaatagtttttagcaccagttgttccaccagataaaaaatattgcgctgggatattctgaggaacatcattataatatgattgaacgttgatgctaataccgcctttagtgttgataaacaaagcaccagcaccacgaatataatgattatatagtccgttgctatctttataaccaaagtgagtagcaccatcaccaaccgcgtttccatcaccgcttgtatcaacacgaagaattgatgtgttcgccccttgtgtagcgtaatcagccccaacattcattctgccattaaacgtcgcctgacctgtaaatgttgaaagaccaggaacggttagatggtttgcgagaattaaagttccatcagaagcaaaacgacttgcatacgaaccaccaccagatcgaacatacacgttcttccctgtatctgcataaatcaaaccaagttcgttacccgcagaatcccggaaaaacaggtttcggtttccgtcgccttttgtgatcagttgggttcctgttaagttaccactgaccgttgtactcataccaacgtttaacgaagcaccggaaaggttaattgaaccatcccagccattaagcccaatctgagcgcgtagaatgcccgtagcgcctgttgtcttgtttggtgcatcatatgcttgtagttcgatagaacccgccccagtagttgcctggtgcgataatagagcagcaaggttagcaccgccagcaggatcggaagtattcgattttgtgttgacaaacaaagtaaacgtgcgcgtatgctgtgacgggaacggatctgtaaccgcgttgttatctgaacgagtagttaacagataaggagcattccccgcagtatcagcaaccaggttaatacgacgaggaaccgttaactgggtgttgttctttaatgtcagattacccgtcatttcgtcgccagctttcttcacctgtgcatcattcgttacgttgcctaatccgatttctgcctttgttggtttatcgttttcggtgtatactttatagcctttgtatgtgattgtgtttccagaagggagcaaaggcaagttagcctgactccagatagtattaccgccaacggtagtacccgcttttaaatctgccattattagatcctcaaatgcttttatgatatttataaaaagaaaaagccccgaagggcttttcttatttttgggctttgagttcccttacttcttcacgaagttctttgattgcgttgaccagtagtgcgatcgttgcagtcggggaaatcgtcaatatttcgttttctttggtatctttaccaacagataccgcttctggtaataccttttgcagttgctgtgcaatcaaaccagcttcacgggtaacaggttcaccaccaatatgatttgatttatcataaaccaaaccatcaagcagttcgactttatccaatgcgttttcaattttggtgaaattacttttcagtttttcatcagaacgaatatacacatcgttaaagtatccgttagcacctgctgtaatgttaccagtcgatgttgtaaagctaccatcaccatcaaaatagaatgcaacagagctttgcagaacaagacgaacacgagttgcgcctggtgtgaagttaggcatgtgaacgtccatcgcagcaacataagtgttgttccacgaagttgctttccagatactataagcggagttgtttactccaggaacatcaacagataccgcagcagaacgttcacgccattgatcccaaccaccgccatcaggagtacctcgaataatacctcggtcagtccctgatacagcgcttgtcgagtgtatcattccagcgtaatattcccatgtattcgagaatgtgtggttagtacgaattttcagtttgccgtctgcttctgcccaaacagcacctttttccgcgccgttattaagcctaaaccacaatacagagttaccgttgctatcgagatataaattacttgaactaccgtaaccttgccggaaagtcatcgcaccatcgcaagaaatcgacaacatctcatctgtatcagtaacgccacataataagcgatatacgttaccctgaactgtttcatgccatataacatcaggagcaccgccacggaatcgacgcaaatattgtttacttccactcgcattagggcttaaaatactatttgcatatacaccaggactaagcccattttgatgtattgtaccgcgttcaccgacaacaaacgaaccgttttcatcaaaaataaattctgctgtttgtgtgtttccggtcgccttgtttggagtagacgcaactatacgaacaccagtacggcggtttgctgtatctggaccatctttaaaaatgtatccgtcatcaacaggagtaccatcgtttttgaaatatgtaaatttaaaatgtctaccgaacgcagattgcaaaccaacgtcacctattacactaagtgtgccgttcatcgtgtcggcagtatttttcaatgcaccgatctctgctggagtcggtttgttgtattcgtcgtagatcttacgccaaccattagcgtcgccagcagaccaagaccaagcaccaggagaaccagaaccgcttcgaatatggaatacaccattatccagataaatctgagtaagagcattacccgtattcgacgtgcgccggaaattgacaacctgaccactatacgtattattcccgtaaggcccatcaacaatgtttccgtttactgacagaacatcgttcttttcggttacaacagcagcaccaaaactgtttccctgcatactgcgaggaatacccgtgatataacggctatcgtggtttgtccaatcagtaggagttaccgtattagcagtaattgccccgcttacgtttaacgtggttgcactcaccgcagagaaggtcgatgatccggctacacggaaagaacctagttcaacggatacctgttgattcgcagaatcaacaacaaaggaagtatttgttgttccgtttttgtatgcgttcagatagatcctgttgccaccgtcagcacgggcgttaatattcatagttgccagcgcaacgccggaagcattaaccccagtgatttgcataatgccctgttcggttgaaggtgttcccgtcacatcagaacgtttaaacaatatacccggagcagccccgcccgtggtgatatcgacataactttttgaatacagcgtgttcgctgttaagttaatacctacggtcacgctttggttgaacgtggtgttcttcgcaacagtaccgccgttgatcgtcgagagggcgtttatatcctccgctgttggacgatcgttttcggtgtatactctccaccctttatacgtcaatctgtcgccagagggcaacagagggaggtttgacgcactccagatacccgcaccacccagcgttgtacctaatttcaaatcagccataaaaatttctcctgtaatgactgtatttatgaaaaaggggctttcgcccctttatctcacgattgacagtttaacgtctttagccgataccgtaccgatgtttgtgttgtttggataacggtataaaccgaaatcaaacgtaacagcaccagcaggaataaccccttcgtttttgtagaatgaatatacgttagggatcgtaccaacatcgcgcatgttgattcctgagatatacgtattattcgcgtcccagaactgtattgtgatatacgcgcttttaccgttagtgattgcgttcacatcgcgtttcatttggcattgcatacgaatcgtatcaccagcttttaagccataactgcttagtgatgctttcgttaccgccgcttgctgggtagcagtccatcctttgaacgggtactccgctgtatttgtcgaagtgtattcaaccggatcagaaacaatataatcaagttcagcaaagttatgcgaaatgattttcttatcacttgcaacaccagtaggcgaaacgggtagagaaagcaatttatcaatcgggttctcatttccgcttgcgtccacttcggaaagtgtctgcattcgaacaccgttcacaccaagcgcagcaccattccggtttatttcttcgcgaggtacttttgtgatctggacgttgcgacattgcgccagccccactttaacggtagacggataatgatatacctgcgaacccattttgacgtttaccggatctgtcggaacagtgaaatatcctgataatgaatgccactgatcgggggctaatccagttgttcgaagaatggttgaagagatccattgtccggtactgttttcagtccacatatacaggtaaacttccccacctgcatcacgaagttcttgcgaacaatatagttcacccgtgaatttgaagatatcgcccagaaaaacatcactaccaacaatccacgtcccgtaatcgtggaagccataaagatccccgctattctggtatgtctggacatcatcgaccattctttctggaataccagttaccccgatatcactgaattcatcaaacaccacttcaacaaaactcgtagtattgtctttcaggctaccagcaccaccgacaaagttttccatgcaaatctttttcatcgtagatgaatagatagctgaataggatgaacggtgagaataattggttgttgtgatcgggatattaaagaaccgagtttcaggccacgcaacagaacctattttcctcattgttgctaaaaagtcatcgtcacttttgatagcatcgaaagtataaaaacatacaattctgttcgctggaagtgaattcaggtagtctttaatcgcattcccgttcgtagcaggatcaccatacatatcgaatgctttgtaatccaataatgctaaagttgttccatcaatgacagccaggttaattccgcgagcaacttgtgttcgtctgtttataatatcagccccgttaatagatacctcaaccgagttgaccgcagaatcgagattagttccacggacaacaaggcgatatttcacggcgtttgcttctgaaaacacattcgccgtgaaactatcagggccgaataacgccataaattcgttattcgccatttaaattattcctcccacacaaattcacaagtcttagttgttggatttgcgaagatttttacgtttccgattttgatgtaatcacgaacaaccagagtatctacagttgaacccgcaaccgcaaccgccccaatttctgccggagttggtttacgacctgcatgatagatcaggtttccgttgatcatcgctttgttgtaatcggtgatattgatattgaattcagtcaataccttatcgtcaatgccagttaagcgcatcttctggacgttaccagagaaatcacccgcctgaacatgtgccgtaccgctcacactggtaaagcgtccacccgtgccgtttacgctaactgacagcgcaccagtcatagtatcacccgctgtattgacataggtactgtcaagatgctgggtaaagtttctggtgttgattacggttgcagtagtcacgccgttatcattactgattgttacgccgttccaaccgttagttgcatcggttcgtaattgtaccgtaggacttgcatcacttgcaatagtcacatcacctgttgcgttcgtgttagccagtgctttaccattcaggcgcagagtagtaccggagtaagccattgtaccgttagatacatcaccaacagtcagaacgtcggtcgtgtcggttgtgccagttgacaagcgatacgtagttccctgaacagtttcatgccatgtagtatccgtcacaccaccacggaaagtacgaagcaagtttttagttccagcggttgctgtactcaaaacagtattagcataaaccgtgtttgctttcgcagactggttaatgttattgttcgtggttacggtgttgttaacagttaccgcagcgttagccgtcagagtcccgttagtggttacgttaccaacgaagttgcttgtaccgttgaacgtgttgttgcccgttacggtttgatctgcatcacgacgcatccagcttgcagctaccacaccacccagtttcaggctattctgtgctgttgcgttcaacggtaagaagttttgcagagcaaagttcagaccgcgaggcgatacagcgtagaaatcttccagataactatctacaggctgagtagaaccaaccagattatcaccgatgaacgtgttcgatttggtagtgataaacaccgcaccacggcgcaatgttgtagcaccccatgccggatcagtaccgttcaagaactgcatggtagccggagtaattgccaggttagtagcagtacccgcagcagcttcgctgttggttgcacaacgaatgataccttcggcggtatccgtcgctttcttcgcttgcagtttcttaggcgtgatgaccacgttatccagagtacctgcatcagtttcgccctgagtcgctacgcgcagagtaccacgctgtgtttcagtagcagacgcaatccccaggttaaccgttgtccagatagtaccggactgagttaaaccatcagtggttgcaaccgcaacatgactcgtaacgttgaagaactctttcagcttaaccggaacaactgccttattcgttgccgtacctgctgcaacttccgcagtggtagcgagggcaataataccatcaagcgattcagtagccttgcgatcgttcagcttcttaggcgtcaccgcacggagatcatcggttcctgtgttcgtttcgtcctgagttgcgatctcaatcaaaccgatacgcgattcagtagacgttttacgatggagcatttcaggagttactacgatcggcattgaagcagatccagcagcagcaccagttaccacttcgttttcggtcgccagaacaaccagaccttttgacttttcggtcgccgtcttctcgttcaatgatttcggagtcagtaagtcaacaccgttattgaagttgtagacgttagtaccagcatccccacgtaaagccccctccgctgtcgtagcgcccgttgtaacgagtttcccgatacctgctagggtttcggtcgcgcggcgcgtgtcgagcttcttaggcgtgattgcggtagtgtcatcagtaccagcgtttgtttctgcctgagttgcaatttccagaacaccacggcgatcttctgttgctgtacgttcgttaaactttttaggcgtaacaattacgtcatccaaaaaagtagccgtagtgttctggttaacttccgcagttgttgccagacgagcgataccacggcgtgtttccgtagcagttttattcgccagtgtacgcggggttactgccagttcatcagaaggcaaatcttcccagtttttgtttacttctgcctgtgtagccagcgcgatcacacccagacgagaacggtttgttggatcaacacgttcaatgatcgggcgatattgtgcaactacccattctttcgtagctttcagatacgacaattctatatatggaagatagtcagtatcggcgttgaaagtcagagtgtcaacactgaaccagtcatcaggtggataatccttacgctgtgggaactgcatcatgtttttgttggtgcggatcttttcaccggaatcatctttaactttgattgtgcagttctgcgttttccccatcatatacatactgatatacacgcgatcaccttcggcaacatcttgcggaagagtcagcgttacgttacgcacagttggaggactaccagcgatcggggtgataaacacgtaatcgttcggcaacatgttcaggtcatcactgatacgacgcagacgaacgcgctgatcaccatcataaacgacccagcggctattagcctgatcgaacatgaagataccataaccggaacgctgtgaagtcacagaagttacgttgttgataccgtcatagctgatcgtgtgtccgctaccaggataaacttgcagagtcgcaacgttcaccgaagcaaggagatccagatcgtaagttgtgattgagtcaccatcgtttgcgtatctaggcaattgcagagtaatcttgcctgtaccgctattacggaatgttaccatacccgcttgcagttggaaagaacccgcacctgttgcgttcacaaactgcgaatcgcggttatcgcgcatttcagaaacacgccataagttaccgttaaagataaacgctacggtcatgtatgggtgagtcagtcgataagagcttgactgaatatcacgcaaacggatctgtcgggtgtttgaacgaaccaaaaggttgttgagacctgcaagaccgccaccgtctttaatggtgataatatcaccctcaacaggggaatctggtagaatatatgtcagttcagagaaacgaccatcagccagtaagtacgtaccggattcaacagggagaccgtcagtgctcgttacgttgttatatacccattttggatcgttacgggttgagatccattttgtttcatcgaaagcacccgctggtgatggaatatctgcgcgagcgtaccaaatacgacgcgcgtacatgatagccataaacgcagcatagccacgggtagaatcgtattgttggatcgtgttaaattcgttaaaaaagtcaacgttcacgccgtcgctcaacacagagcgggatgctttaccaacgttgataactttttcgccagcagcatcaaggccacttgtggcgcggaatgatttagctaccattatcgttttcctttatcttattcaatactgatatttataaacaaaaaaggcgaccatcaagtcgcctttttctcacggtaattgttcagccaatctttaacaatcgcgtgatgaagaggattcgcataatctaatttgtttcttttcttgtatggcgtaaaagcgtttttctctttgtccgtcatttggaaaagggtttgaaatgatttgcgttgccttttcgtttgaactgcttctgtggtttcgataatggcatcaggaaaatatttttccttcatgtatttcgctaaccgcatatcaggcacaaataaattaatctttcgtttgctgttgttgtgtcggatatcagaacgagcgcataactgaaaggctggttcgtaatatttactgacaacataagcatcaactaattcttcctcttcgagtccagaggacaccgcaaccgctcgcaacatttgacgaagccagggtaacgggttgtaactgaataatgctaccacgttagtatagctcgaatagaagttcaatccgtgcgagttatacggaatttcttgcccctcgctaaacttcgatcgatacgtgttggtgcagtagatgaactgttcgccccctagaagcgcctccacgcgttttttaatctgggtgtatactgtcgtcccagattgagagagatcgcccgtataacgcgaataatccccctctgcgagcacatgtatatgtatgcgcccagtgtttttgtattgcttaaagtcaaccagcttttgaagcggtgaatctttgaactccacatcatgaaacgtttgcaggatcttccctgtaattgtgtctttgatgttggatgaagcaatggttacatttttgaacttccactggcttacgtcatgatcctctacgaagtaacagacatatcccgaatcgctacattgcatcttcaccggaatagcccctaacagagcacggtaaagcgggaacatcttcattgcgatatcatcacgtttacgaagaccatcataggctaatcgtgtaaccagttctcgtttttcttcgtcaagttttaaatcaacgatatcatcggcattgcaactaaacggcaagcaaatctcgcgtatgtgcttgatattgctattaaatcgcagactttcgaacgcaaccaaatcaggaacttcgtcaatatacagggaaaaatccttatacaaatcaaagtcatcaatgtttttcagtgctgcatgagtgatgaaaatcacatcgtaatcattgactacttcacgcagcgcatcgttattggttcttttggttcggtgatccgtgtccacaatcaccgcccgttttccttttacctggttgatgtaatagtcataagactgttttgataacatcatggaaatcgaagcgatgattgctttttcgcccgtttgattgatatggttcagaatcgcctttgttttaccgcttgacggaacacattcaatcgtattaaagatcatttattcttagcgtatttcttctggtatttcttgattgcttcgtcggtgatctgtttaggcatttgacgtgctttcttcggtttcagtggttcgacaccgaagatttcaacgccgtaatgtttcagcatcattgcaacgatttcctgacgaatgaagttttcgggaaattgatctttaatctgcttatgaagacgatcttcgagcgcgtccaggtgagtaggagtgatgatcgcggtgttatcgcgttcaacgaatttctccatgtattccatcgtttcagcatgaacagcatttgcagcagggagtaaaatttcacggctcatttaatcaccaataagttgtttcagttgcagataaccgccgataagtttgttatcgacaaaaatacgcgggtattgaaacgctaaactacgttgccttacccgttttgctaactcttcgatacgtgggcgatcgtattcaaagcccagatcgtttttcgcttctttcagaacgggataaaatgtatattctatccctttttctgtcaacagcttttgtgcttgtatgcacccgtaacagttatgaagactttcgggaatgccgtagatttcgactttcattcttctttccgtatggtttgagatcctgcaaaatacgctttttctctttgcctaacagtttttcgatattctcaacagcggttaactgagtgtgcagatcgaacaggtttgcaatctggtcttcctgcattttcagttcagattccatgttgatttgatagatgctaccaccaccgaaaacatgttgcaaggcgaaacgaagcattgcatcggatttacgtactggcatcggtgcgatgctcaacgtttccaggttagccccgaatgatggatcgatacggagatcacgcagaggattttcctttacagggcgatacgtgaatttagggatatccatcaggcacagatccgaaccagtgacaccagcggaaacctcttccggtgtagcgatacgcataacgttttcagcctctacacctttacccagattaacttcttctggttcttctggggtgaattcaccatcttccggtgttacttccttgaaccatttccatagtgatgcagggagttcatattcgtatccaccgtccatgataaaggcgcgatcttcgaactcaccaatcgaggtgcgatcaatcgtcacataacctttttcacgaatgatgtttgcgataccagttttccaggtcttttctgcaaagacttctggggatacggttaaaccgtaagtttttccagcgaataattccatgattacctcaaataaaaaggggatgccgtaagcacccccgaattatattacttatttgccagcagtgcaagttttgcggcggcttcgcgaactgcgcgagctttctgcgctacaacttcgatcgctttctggtgttctgccagtgcgtcttctactgcctgtgcagcagcgatgaccagttgatcgtgttgctgtttggaaatatcaaccgcctgaactgctggagtgtttgccggattaccagtacccagttcacggaagaatttacgctcacggtgcatcacaaacgggaggctacgatcttgcgtgattgtcgcgtcaccgtcgccgtcaacattcgaaaacaccagaacaccgttgttgtttttgatgtgttgcacaatgcgtttgttcgcagtgtgagagcgcaggaaacctggttcatctaccagaacatacggacggtcggcaacaaaacaaccaggcatcgcttctacgagcgctggctgtggtgcagcaggtttagcaacagacggttcggttactgccggagcgaggttaacaccaccatccagttcagaatccagatccggtttcgctggtgcaggtgcaacagacggtttgcctactggttttggctttttagcgcgttttggcgctggggctttagccggagcaacttctgtgaagtatttcgcttcccatgcacgaagggtgttcatagcgacacctgctggagcattgaaggtgtagcgatcaccgttacggcttgcgatgtttacaacaccgttcagtaattggtggatctgttttgactgaacactgttagcaatgtttttgccattgtcggtgaaaccttcgacatcaacaagcttgtaatctttaccagtttcgaagcgggtttcttttgttctcaccgtccacggatgcgaaccgcttcctttggtgatgtttttcagcggaattgaccacttccagcaatatgcacgggcttcattacgggttttgaaattcaggatcatgatattatctctcaattgggttaaatttatgctacgtggatatcttaacagaactaccaaccaggtcaagcgatatttttaatttcgatggaattctttttgaactcaatcattcgctgattatccgaaccgcgaaacggtttcttagtcggtcgatccttttcgtatcgtccatcgatcagaacatcaatgaatggtaacagcttagaacgttttgtatcgctctgtaaggcttcgagggcgtaacccgtccaaacccacacatctttatcaggaaacgtcgcacggacgcgctcaagcagttttaacaatactggatgattggtacggtaaaacggatcaccgcctgtaagcgtcaacccgtccacatgaggatttgaaagaagtttaatcaactcgttttcagtctcttcggtgtatggtgtaccgttgcggggattccaagtgattttgttgtagcaaccttcgcatttatgattgcatccagtcacaaacaacactacacggattcctttaccgttaaccacatccatgttatagatgcggtcaaagttcatcagcctttctcccctgggaacagattgttcagcgcttgggtatctaatttcatttgaatcattttatagtgcctttcttctcaaggatcagttctttgatcctttccacgattacggcgtattcccagttggctaacttctgggtatcacaccactgttgaaaatccttcattgcttttacgtgaccttctttccagtaagtcaccgcgatttcgttgcaaagattttcagtagcagtatttttgattttcatgatttagcccctatagtttgttgtctacaggggcatattataacatcatgcgtcgtccgtcaactctttttgaatccgacataatacgcatcagatccattccatgtggaggcgttaacgctacccaacagaacacgacaaggcatattattatgcgcagactctacaacctgggagactgaatccagcggattgctaccagacacccagcggagcagatgacgatcatcaccgttaatcggatcaacgaattcaaagctgataccgttttcaatcagttcgtgcagaagaaagtttatcgctttgcactgcgctttgttgatcagcataaatcacctaccagatctttatcaattttggtgtatgtgagcgccggatcatacttctccagcacgttctttttgcacgaatggatgaatttttccattgcgcgggctttcatcaacactttgaaatcttcaccaaagcattgtttgactgtgggaattgcacgagccgctttgtcacaatcaatgatcagcttgtattcgccttgtgttgtggcgactaccattgaaatcagaacacaaccatcaaatcctttttcattgattttatggaagttcagcttatccgtagtgcttgccaggttcgcataacgatccccgcgaatgttacccggagaactataccgagaaacgttgattgaaggaatacgaatatcttcaacgatatcacatgacgcaacagcttcaacgaaatcaagaattctggtcgctttgatgacgtgcgccttaaacgaaccgacttctaactcatattcatctttccagcctgaatagtagtcaacagcagggctaatcgctttcatgagcgcttcgggaatgtcaatgtgccataactgttctgcgtactgtttgcgccagtctggatacgttttacgtgctggtttgaatgcactaccgccgtcttcgaacatcatttctttcctctctttttcgtaaatgtcgtacacacttcttcgttcgtaagcgtcttttaggttgctgtttactatactatcatgcgtcagttcttcgcaatactttttatcccattcagaacacgcatgatcaaccatttcctgaaaaacgcgctgtggaacattcccatccacaagaatcctcaataagcgatcagtatcatcattcggtaaagtatgaaagtttttaggaagtttaacatagaagtttctcgcacgagaaatcaaccattcttcaccgcgatcacgttcaatagtgtaatcgtacatagcaaaaaaggggctttcgccccttcctcttatttcgcgttcagggagtcgatgtaagcgctaacgtcagcggaggttacagaagcggcatttttgccacccagcaacacatcaatcttcgtcacgatggtatcgacgcttacggaggtgtggcctacagcggcgatcacgtcttccggtacagtcagacccagactttcggtttgcttgttcagttcgatgatctccaggttgattttgacatcagccagtttgcgatccagttcgacgacagagagatcaatctctttgttcatcccttccagttcttcgatcttcgtctgcaagccctgccagatgttacgatgttgcagcgccagcacataatgactgttggacacttcctgccccgccgccagcagttttttgatctccgactctttgccagtgtgaaggtctttgtgttctttgactttctttttcaacttcacgatttcctgaacagcagaaacgcgagtatgttgcagacggtcgatctctttgatcaggatacgtgcagcactgcgccaggcttcttctggggaagtgttttgttcaattgcagtttcaactttaccagtcacgaatgctacgattttcttgaacataattttaccttatttgatttcaaattgattggtgaaccattcaggggctttaacaactttcccctctctgatataaccgattttacatagttcgttggtcaagtcaagtctttttccacccgccatgtaaaattttaatctgcttactgggatcaccggacggataacgtcgcgatagccgaaatgcgcactacgcaccactatagagagcatacgcaagcggttgatgcaaccagtatacgaacgcccagtagcactggagaagtcctccagcgtaaccccaggggcaatagcacctatcagatcaagataatccttttcaacccagaaccgcccaacagaacatttcgatacaccctcagccatttttgcgtttgggtgtttctcgtcttcgcgcttctttttgtcctcaaggaacttattgaagcggatctcttccagtctgttttctctttctacccgtgcgcgtacacgggagggaaacagagtatcaaggattttcccgatcatatcgttggctttccgtttggtagtttcagatcgaaaggaacgttcacaggccggacggtttctaattggagatattgttccatccccacacgcttaccacctactttgttataacgaatgttctttccgtcatagcctacagcctgtgaaatgtagtagtgtttagtttcgcgtaaacactccatccattcttgtgttccggttttgttgcgtacccgcgcctttaatggaaacatcattcaccccgtagaactttcagttcaccagacaaacgctgtagattggcggttgcagtatcgtaacgtttttcggtctctttcagggtagtttcccgcgccttacgcaagaatttttccagatcacctggtttcgtcaccagcttaccatctacgtaaattcgtcccagcaggtgagaacaatccagcagttgttgcgcgtcggctttttcaacagcaggtttaatcgcgacaaactttttaaagaatccgcgatcctcgttatcaaacagataagaatcttcggaataccatgttgtgccattggcatcaacgatcccattaacacctttccgatcgcagtgcgttaccttgataggaaacacgacagatgatagttgattaggcgacagaggactaccacgcaaagctaaattgcggtacaccgtcccaaaactttcttcgtcacgaaattcaaaataatcttttgtccagtacatcatttttcaatacctcatagtttcggtatgtgcaatataacaaaagcccctcactttcgcaaggggctttttgattaattttgatgcttagttcggtgcatcatttctttgttcttaccttcgttgaaaccacggacagcaggagcacccaaataaccgcatgtacggcgcgtgacgctcattttagccggatcgtgattgccgcagtgcttacagtggaaaccttcttctgtaggcgtgaactcgtcatcagagccacatacaaagcacttatcgaccggaaggttagttccgaagtaatccagtttatccatcgcataatcccagactttttccagggcttgcagattgtttttcatatcaggaaattcaacgtaactgatatgaccagcagtagcgatgtaatgataatcggcttcatagtcgattttctcgaacggcgtcaccttgcgatcaacgtcaaggtggaaactgtttgtgtaccagcctttatccgtgatccccttgacgcttccgaacttctcaaagtccagcttacagaagcgatggcagagcgattccgctggggttgaatacagactgaatccaaaaccagttttcttcttccatgcttcggttgcagcgcggagatattcaatgatcaatcgacctaatttctgggagccgatacgatcgaatggatgctggcctgagccaaacatcaacagcgtttcgtgcagtccaatataacccagactgatagaactacgcccatttttgaacagttccagaatttcatcatcaggattcagacggacaccaaatgcaccttctgtgtacaggataggcgcaacgctggctttaacaccacgtagactatcaattcgagtcatcagggcttcaaagcacaaacccagacgatcatcaagaatacgccaaaaagcctcgtgtgcgtcgtctgcttcctgtgcttcaagagcaatacgcgggaggttgattgtcaccacacccaggttattacgtccatcaagaatttcattaccgttatcatcatgccacacgctaaggaaactgcgacaacccataggagatacaggaacgctagaaccagtaatagcacggttgttagctgaactaatgatatctgggtacatgcgtttagaagcacattccagggcaagttgtttgatgtcatagttgcgatcctctggatcaaggttgattcctttttccatgaacataaccagtttcgggaataccggagtgataccctctttacccaggccgcgaatacggtttttcagaatcgctttctggatcatgcgttcacatcgggattgaccagtaccgaacgtaattgtaacaaacggggtttgaccgttcgcagtatgcagggtgtttacttcgtattcatatgactgaaacgcgtcgaaaacatccttttcagttttatctattgcatactgaacatcacgagggatttgatactttttggcatctttaaagtgcttatcatatgtcatttgaacatatggagccagcactttatcaacgttagcaaaggttgtcccgccgtactggtgagaggcaatctgtgcggtgatctgtgccataagagcagtcgcaacaccgattgatttcgggggttcgatgtctgcgttacccatcttgaagccattagccagcatacctttcaaatccaccagacagcagtttgtgtatggcgtgaacgggctgtaatccagatcatgataatggatatcaccagaatcatgcgcttctacaatgtgttttggcagaatgtggttacgtgcgaagtgtttcgctacgataccagccagcagatcgcgctgtgtcgggaatacccttgcgtctttgttcgcgttctcgttggtgatctctttgttggacagattcaccatgccggagatatctttgaacagcttacttttctgttcacgggcaatatcgcgatcgtggcgatattcgatgtatgcacgggcgaccgctgggttcgttttcatcagggattcttcaacgagttcctggatacgggcgatcttcattgcgctaccatcgcggatctgattgtactgaaccagcatgattgcggcatcagcatccgtcatagtaccgccagctttttctacagcaatacggattttttctttatcgaaatcgacgtttttaccgtcgcgtttttctactttcatttcgttgccttcattaattgctttctatatttcgcggttaaggctttgcgttcgtctttgtcggcgtactcgaagcccatagaaaccatttcggcaatcatatcaggtttggtaagtcttgaaaaccattttaccttatctggtatgaatttgtcatgaatacggttttcggaatagtcttgtttcagatatgcaagcaagttctctaaccactggatgtaatcgacatcacgggacaccagaccggatctgttgaatttgtgcttcacaataccttctgtaccgttgcataggttacacagtaggccgcgcacacgtccggcgttttcgccgtctaacgcatggtcatggtcaaggtgatgtttctcgatctcgccctccaggggacgtttgcagatagcacaacagcccccttgttcggtaaagagagcttgcttgatagttgggtagtcttttttggtaattcgtttcgtcagcataataacaccattcagtaaggtgtcattatttattacagggtgcggacgtactcacgaagttggtcgaacccgcctacgtgtttcccgtcatggaaaatctgaggcatggtcatccggcgcgtaccaacaagcgcttcgagttcatcgatcaccgcttcgttcagtacaggtttaccgtcttccacggaatccgcaacagacacgaactcatacggatgttttttcgcgtccagcaagcgctttgagttcaggcacggagcgcagttatacacagaagggatatagccataaattttaaacatgttaacctacattaaatcgttcagtgttaaagggaatgtatttacgtcgcgtttctggtagttgcacacgtagacttcttgcgttttgttttgctcgtaagagtcggtatgctggcctaacagatactttttatccagattatgaacgcggtatttctgcatccattcaatcaggatatcattttgttttccggcgtggtgagtcacattggacagcccgaacatgattccttcgctgtgcagttcatccaggaaagcatataactcacgttcgcgatcttcgttccagaacttgttatacactgcatcggtgatcaggtaaggcggatcacaatacacgaaatcattttcacagatatcaatgtcacggaatgaaccactggaaaactcaatgcctttcacattctttttgaaatgttcaaagcgttttactgttgcatcgttgagcgtccggcatccgaaattagcgttgaagtcgcctttgtcgtttgtccggttaacgttgctgaatgaatgcaggatcaggacatagagccataacggatctttgttctggttgtattcatcacggaatttcagatactcttctttcttgtctttccccagtcccttcgatgcaatcaattctcgcacaggagacaggtcaggaagcgttttaagacgctcatacatatcaataagcgtcttatcgtaatcgttgcttagaacgggtttagggacgtttaacgacacactaaggccaccgcaaaaacaatcaatgaaacgcatgtatgaacttctttcggggaacaacttgaagagttcaggtaatagagactgcttgttgcctgtataggggataacacccaaataactcatagaaaagattccagattgttaacgtatggctgaacacgaagaatagaatcgtgataataattctccatcagttcgaagcctttgaaccgtctgttggttagtatcgacattttcatcactgtaccagaaccagagaatatatcaagaaccaagtccccttcaaccgtccacgttttaatgtgatcttctgccagttgttcaggaaatattgctgggtgtttgaatgcaatctcgtccttcgttgagtgattgcgccctacagcgtaataccagatattacccttaattttatccttgccaacaggtttacgtttcttaccggaacgtgctgaacggttcttttcgttggtttcggaaaagtagctgttttgtcgtgcggtttccttttcagggaacttacacggaatgcggatcgggttgaatgtttttggtgcgccttttgtccacacgaacatgtattcaaagtcctgttcgtatcggttatggttcttcggtagagcggttttgtgatagatcatcgtatcatgcaaccgaaaaccttgttcgatcgcgtacaaggcttgacggaaagatgtacccgtttcactaccgttgatagtcgcgtcacccacaacccacacaaccacaccaccgggagcggtaacgcggtacagttccgatatcaactctttccatacgtgttcaccccagacatcaccagagccgttataatggcgcaagttgtcatacggaggcgaagttatggtcaagtcaacagaaccagattcaagctgtttaatcagctttacggagtcgcctaaatggaggtcaaccccttctttgattgtggtaatcataattcaccaagtcctttctcaaataaggcgatcgtttcgtacttatacccacgattcaccacgaagcaatgattttcgcctaatttctcaagcattgcaatagcacggtgttcatcttttttatctttcaacagataagcaatccgaacaacctcttttagtgtcgcgttgtccacctgttccaacttgaacccgtagcccaccaacttacaaaaaagccccttgcgagcgacaaggggctgattgttgtagaagactactgatccgttatcgttggcgcggatattaaatccttgctcgctcacggataacccctactgtatcggaggtgtttaatacaccgttctcgtaatacgtaatcatcgcatcacgccacccgtcaggaatctcagtttccagagtgtcgattgttttgaattccacaccgttagtgatggtcatcagcaaacctttcttactctgtttccattcggaacctttcgggcatttgtaaacgcctttccacacaccattcacgcggatagcgcacagtttttcagcatacttttgagtgtcgcgggtaacttcttgcagcaaaccgccgcccataccgaacgcgatgttctcactcgcccacttgttcgcttccatccaacttaacacacggttgattgtttcaggcccgtggatctcgtcgccctggatgattcgaactgaattatgcagaactttgtaacctttgctgtttacggtgtatccgaagatttcgcccagtttacgcagggtgtacatgatgttatcaatcatatcaccggaatcaggacgaacaaccagagtaccacccgcagcaatgatttgctctttatattcagcaatgcgatctacagcgcctttgtagtcccaggaatcgtacacacaagcgtagaaactatccccgaacatttcgatgctgtttttatatgcttcgtcttcgttctctttaccgtaggaaatcgtagtcgaatgttcgcgagccggaattgaaacaccgattgcttcgacgttttcaacttcatcaaacagagtttgatagtccgcaaacagactgattgccataatcataccttcaacggtatcagtcccgatgaagttatagaggtgtgccagcccaccaatacccgcagattcagcagaggtcgcgccacgcgccccgaaatcatgcagacgtgtacccagtgtgatgttatatgcttcaccagtcaggtcagaagtcatatcaaggtaatgagccagaacctttttacactcacgcgatagcgttgctacagatgacggataccagataccgcgaatcgtcattgtctccagccacccagccaaccatgagaattcacgttcggcgtacacagtcgcaacggcatttttaaccggaacaaccgtaccttctgggatcgcacggaaagtaacagggacataacccagttctgcgatcttcttccacccttcgtagttgaaaatctctttcccaaagtgcttacggtaaagtacccgtgccaactcaacttgtttcatggtaattggttcggcaagaacccgcgcaacgaagttaacgccagcggttactacttcatcaaacttaccaccgcgagattcaatatagaacatcgccgcatcagtgccttgtggatactgcaaccagtgggacactttgtaggaatcagttgaggtgatcaggctattcagttcattaaaagttttcatttaaacgtactccacgttttgatttaaaagatacgatccaaacgttctggatggatcgtgttccagtatttactcttacagtctttcctggattttttaccattagagcagaacaccttatgatatgtcgtcttcttgtgcaactgtttgcacgtaggacaagtgatcatggttcctactttagcggcttttgcaacatcgtacaattgtttgatgtccttctgccgctcggacgtaatgacacgcccgtttacttctttgacaaccgtttcagttcgaatagaaccatcggaatatttaacttgctgtttctttccagatccaacagtaagccccattgctaaacggcttcgaagttcacgcttcgttctttcaaccccgcgcccaacacagaagaattctccatcttcatcatcgagatcaaggtcatcaaagtcagcccagtcttctagcgcgtccgcttctgaacactcattcattccaaacatagtcgatccttagttgctggtcagtaagaagacccggttgtcgctatagtcgatgtagcaatcccaccaacccgcacagttaacaccatctttttcaaggcttatgattttaacgctggttgcaacgtcatcatattcataaaccgcacccagttcgttcagcattgcttcaacgttagcccgtaagcctttaccgttgtgtgctacaccattcagtgccaagcagtagccagcgcaagtaggtactaatttgatttccatgatgttttccttttaggttagtgtcttgtctacgggagctatattaccacactcataactcccgtcaacaagtttttcgaattattttcaccaggtgatgtaataagtcagatcgctatatccgtcacgcttaggatcgctaaagttggtaatacgacgcgaacccgcgaaggtattgagtaacgcagcttgtcggttgcgctgtgtatcgaaagtaaacccttcttccgccagccattcacccagatccgcatatgctttttcggtacattcctgatccataaccttaccgataaaacgtttcatatcaaaggtatatgattgtttagtcggatatttcaggacatactcggaaatgtctttgcgggatgcttcgaccattttcgcgttgatttcgtcaacaagtttacgcgcacgttccgccagtgtcgggctacgtccacagcggggatcatcttgcgtttcgcgtttgacccactgtgtcccgcttcccgcctgtgcgttcacaccgattccattgatttctaccattatgtttcgccttttttaatgcctcttcaactgagaggcgttcgtaattacgtgattgttcgggagttatcaccagagaaaatccagagtaggaggtttagtgttaatccctaaagtatcgcagacttcatccagaacgttttgattccaaagattgaacgttggaaccttatacaatctggcaagccttgcagcgatcgcagtaccacctttaacacaaaaatctttctctaccgcccagaatagaacaaaatctgtaggtttgtccaggttttcggttaatacctgcattgaattgcgagcatatcggcgctgtacccattcgttttggttgtcgaagtgtccagctacctttctcgcttcgtcagcggctttgtacgtgtcgtattctgtatagtcgatgatatccttaccattcgaatacaacccgttaaaaccgttctcagggaggattatacgccgtctttctggtgagtagtcaaacatgaaatggctatccattccaggagcaccaccagagtaagcgaagatcccccgatcacttaaagcacgtccaatctttatggctatactcgcgatacgttcagggggttcacggctaccgatcagggtagccgtttttgcgttttcgagaacagatttaaaattcattgttcaggattgcgccccagttctcacgaaccagatttgacgcttcgttagtgaaggttttcttcgccagcgttggattttcgaactgttccaggaaaggtccgtagttacgttcgatttcttccagcgcatcctgtaccgtcagccccatcacgcgaccgaaatctttcgcggtgatattcgcgctgtcaatttttgacaggacgtttttcacacggttttcagtcaggaagcaggtgaattcgttcagcttcactttgtctgtttctgacagttcagaaggagcattgaagcggttcgcttgcttgttcttcttctcggtgaacttcgtcgttttgcatttgattgcaacacgttcaccgttcggcatgaaagcgggttgaacaggcttcatcacgaaaccttctgcgatgttctcaccttcatcatctttcaacatcatgaagtttttgaactcaggttcaacaccgttctttgcagggatcgcaccggagttcgccaggttaaccaccgaatcaaaggtgataggcaatgcgcggatctcgtcaaacgtaccgtatgccagcagtggagccattttcaggccaacagcaacagcgtaatttgcaacaacgttatcagggaggaattgaccattaacgcggatatcaaatacgtagaaatctttttcgccgtagtcaacatctttctgaacaccacgccccgcaaattcgccgtatacctgaacaaccaaagaaccagtatcagcatattccttatattcacaggtatttgctagaatttcccacagcttacgaacaggttcagagtattttgcaactactggttcacaaccgtaaaactgttcagcagggagaatttcaccgctacgttttgccggaatgactttgataccgtccgaagtgatcaggctaaaattagccccgtggatcttttcacgcgcaacccacacacaaccagtaaaaccattcatgatcacaccattgatgaatttaccttcataatggttagtcagagaagaatatttcacaaacataatttaacctttgattttcagttgtttttcaatttgatacgcagctttgcgtaacagtttcagttttacttctggaaggatcacagaacccttcataaacgcatcgagatttgatttctcgctattcgcggcgctggttactgcgatcgtgttttcaaccgtgtatcccagagaagcgttgattcgttccattgttcgggagtcagagcaaccgcctttgttgctaaatggtctgccggagtaagaacatactggttcactcattagcttcgcccagtcgcttaacgtcagagcaaattgaaggttgcggttacgcgcatcatcgtttttactgttgtatgaacgagcgacacgcagatcgaattcaatttgctttgcacggcggcggtgttccaactcagcaggatcgagtgattccggttctactggctttggttttgcttcaaccttcaccaaatcctttttgatagtcgaagttatcacgcccgaccagcgattcatcattgaagaattcatgtaaacctcttacgctaaacccgcttcctggaatgccagcgccatagcgccgttgattgctttacgtttgttatctggacgcggatcgcgtttagctttggtcttaggcttacgctgttcttcacgatgtttattaatgtacacacggcgcagagcatgtttcacttttggattttctgcgcggaaagcacgaattcgctcaatttcctgaacaatcacgtaaatgtcgccgttatcgagcatgtgctcacgggcgatctgtgcatagcccagtttcagatcattgaatttgaaatgaatctgtactttttcctgctggctaacttcgctgatattacgctgaacgattttcatagttactttcctttagtagaatcaattttacgaataaactctaacacttcggcatttctgctgtcaacatttttaagaacaaaagttacaactacattaacaccggatgcttcgttccaaccatcagcacacgggatcatcagatcatccagagtgttgacaaggttttccatatccgcagggtgatcgacaaacaaagtttgcgtttcggtgatactggctttgaatcgtttcccgatctgtgcttcgagttcgtccagcatcccagcagataacgcggcgatgtcgatgtttttcattccaccatacacaacatgaaatagtttcatatacaactaacctcattttcgtatttttcgcgttcgaaacagtcgggttcgttccagatctggtcaaactcacgtttcgtcatgatataaccacgggcgattttgcgagttagatctgaaccgatcggagcataccacaaaatcaatttacacatcattccctgaaccagacaatcatacagccctttttccagggtgcgtacatctgttacgctatcgactaaatcgggggcacttcgttcaggatggtctttccactgactttcgatgatgtcgtttagttccctgtgaaaataaatccaggattggaacgatgcatcaggcggatttgacttgcaaccagcaggataaaattcaagcattttgatcagcctcattcgcaatacagatcgccataaaggtaaacataacccccaacgcaaccatccagatcgcggttaaatccccatacaaagaagaataaccacccatcacttcaacgcgatatcccagcaagaaaacgagatacgctaacaccttatctttcataattcctcacagaaagcccatgcagcatgataaacgcttgcgcctttgtcatcgttcatgcataccacatctaccggacacacaacccgatacagtaccggatcaccacctattgaacgtgcagcccttccagcatagatacgagccagcccgatatcagcagtgaagaaaacacgatccagatttttctttctgcctttttcagacagagtatcagaatcacaaggaggcaacaacatgctttcgattccggcagcagtacatgatccgtgatagaactcaacgaactctttgcggcagttaatggtattcatggttatctccttgttttcagagattacagcttatcgctattctccagacaagtcaacaaattctttttcaacgtcttcttttgttctgaacaggtaatcagtaaggctacctgtcatcaattcgcgagttttagcaactgaacgaacacggcgttcacgttggctttcggcatcaccaattccgtgacctggttcccacccttccatatccaacataatgcgcgggtgcctcatcacacgaatatcgtttccatatgaatagctgttatattgcccgaatacaaatcttttgaatttttcgtgatgaacatcatcaacttcgacctgttctccgtagtaaacaatttcatcacagaacgcagcaagaacaagcccaccagagttttgaattttcaggattgcatggatcatgcggtgacgtgcttctgcaattatatcatgagagccaaatccaatctcttttgtcccgaagcgacagaaaatagaataggtgatgttcagcaggtatttcgcgacgatttgccattcattatagataggattgggattgacacggtatgctgatttatattcgcgacgcagttgaagaagtgtttctatgactttagcaacactccacccgttcggataagtcgaatcgttgcgtttagcaacagcaattgttgaatttgcgtataagtggttgaaagacattacgcggacgttatcgacgtaaccacgatcgcgatcactccatttgaagtaatcccattttggatcacaatctggacgcatagacggggtatgccagcgcttgaaccccaagagattacagaaatcgtcaatcagggtatcgcgacgggatttatattttgactggtcgccaagagcagcggcgttgatgaattcatgcagttcatttttcataattgttaccttatggttaaagttcttccggcctatccgtcgaacaattgcactataaacacactcataaaccgtgtcaataaatacttttaaataaacacctggagttctaagatgaaatcattcaaagactttacgagccttgatgaagcgctgatcaccttcggcggtaaggcttatcctaaatttggtcaggtagtcatcctggctggcggcgcgggttctggtaaagggttcaccctcgaaaagctgttaggtatcgaagggatcaccctggacgttgacgcactcaaaaaattggtcatgggtagtaccaaactggcagcagagatcaaagcgaaaactggtcacgatgtcaaaacaatgaacctgaaaaacccggacaacgtagcaacactgcatcatgtgatcgcagacgtgttcaacgtatccaacaaaaaccaggcgcgtgtgtacgctggtatcacagcagcaccggaagaccgtaaaccaaacctgatctttgacgtaaccctgaaaagcatgagcaagctggcaagtatcgcccgtgatgttgaagcgctgggttatcagaaagaaaacatccatatcgtttgggttatgaacgatgttcatattgctatgcagcagaaccttaaacgcgatcgtgtagtgcctaaagaaatcctcatggatacccacgaaggggcagcgctcactatggcgaagatcctgaatatgggcgactctctgaaacagtacatggacggcgatatctggatcagcttcaacaaagtaggcattgacagcgaaatcaagaaatctgacaaaggcggtatgtttgtcgttaagtctaactacatcaaagttaaggcaaaaggaaagccgcagaaatccattgatcagcttgataaagagttagtggcgaaagttgcagcatacgcaccgaaaactgatacatggggttgacaataggaacatatatgaatatgatgcacacacaaaccgaggaattgatatgaaaaagtttttgttcgatatggatggtgtactgttcaactgggaaggttcttttgttccgatgtacggtgacccggcgagaatgccggaagaagaattgaaaaaagcgaaacaggctatatcacaaactgacttctacgaaaatctggaaccattacaagagggcatcgacctgttctgtcatttgagaactttaggtcaggttgcgatcttaaccagcgtagggaaatacaattccgatgcggtagcagaacaaaaaagaaaagcgttgatgaaggtgttcggttatctgcctgaattccactacaccaaaagcagcggagagaaagcagcatatgcggacaaaggtatactgattgatgacagggcaaaagctgtgttgccattcagaaaagccggaggtaaagcgattctcttcgttggtagcaaagaagaagcattgaaagaaatcagaaaaattgcataaaagaaagggaaccattgcggttcccttttttgtttatggtgtgtaatccgcaaaggagcggttcacatcctgaatagtgatgttcatatcgtcgttcaggaaaacactacgatatttccctgcgctatcccatgcttgacgatgcttatcattgcgggagatcagaggacaacggtaagcgtgggctttcagttcgttcagatcccgacaagtccagaagtctaaacgtacaatacccatctgtgcgcatactttatccatgtacgcgattttttgactattcacccaggacgggctttttgcttcgttgacgagaataaaaccgacttcgcgatcgcgataggtcatgccccatttcatcatatcccaacccaacacctcgatcgccagtttttcatagaaatctgtacgaaccagggacgatacagcagcttcatattctgcatctgtcatgttttgaggacgtttgccaaatttggcttcgatcgcatcgctgaattttgcgaatacatcattgaattcaaatagcagcattgtttaccttcttagtttatacggtaatagttactggttgtgctttaacgtttaccgtcagagttgcagtaacagatccagaggttgctgttacgacaacatcaccttcactaaccgcatgaagtttaccaccaacgatagaaccatgaccggaagagtcaacactcagagtcattgctgtaccagaaggatcgatggtaaacagatcagttgcagccagatccgcatcacctactttgaaatcagcaggagcggttttcggtgtaattgttacgacaggttcagcaggagtaaaatcactcagcttatacagataaccgttacgggattcgatgaaatcaacatcggtgtaatcaatatacgcctgtttcagtgtgtcgaattctttcgcgtatttttacgccagtcttcgcttgcagcattcgcagccacgatgatatcaaagatccaccacggcagataggtaaagctggtgttacgccacgggatcgggtgtaccgtagtccatttttctgtagccattttcaaaacctcttagtttttctctatttagagaagtaaaattttgccgtcacaagacggacatttatcatattggttcacgcgcccatagccgttgcattcaggacagaacgggtttgttacaccgaacacattacggatcgcgtaagtggattgttcttctgtcagccctacgaacccatcggtattgatgaaatgttcactctgttccggcagcatatcggtatcgtcatcaaggataaggtaattcttacatccgaaggtgtcgatccatgctttgatttcatcaccgcgtcctgcttgtcggtctgttagattcgtacaggttttcccaatgatgcgatacaatccccacgggtagaagatttcccgtagagtatgggttgtgttgccgatcctccatgtagaggaaatgacaatatcacagttcgcatgatttacgatccggcgcaggtgtcgagcacattcaatgtccatatgctcaccaaatttcatgcaccgcatattatttagaacgccgtcgatatcaaggaagatgacgtttccgatctctttaccttctgataagtctttcaggcattcgtgatttaattcagtcatattttacctacaaaaaagggggctacgccccctttgaattttaatagaaaccgcgagcttcgttatccaggcgacggtctgcaatcatgtgcgcttccatttggcgagaaacataatcaggatcgcattccatttttgcttcttcgtagttgtcccaggtatcagcaacccattttgaaccgttccaacgagcataaccaggttcagcagggacaggataatcagcttcgtaagcgtggcgcagtgcttcttcaacagtatagtaaggagcatttgaattgactactttcttcactttaccatcagaccaaacaaacagaactgggtaataagcgtttttcatcatttcgtttttcattttgctttccttcttcactgcgagagccattcccccgccttcgagtacaaatatactttaaacgagggtatgcgtcaacaagttttttagcaaaaagtgctaaaacttaaatgtttcgaatcggctatttctggtttcgcgaacacgaacttcaccatcgcgcacgatatagaacgcaagtgatttgattgtgtcgattgcgcttgcatgtggacagctatcaggatctttgtaccagtctggggtttgtttaatccagtcatagatccaccacggacaggtataatacccgttagaactcgcagagcgccccatcatgaagattgtcgggctaaacccttccaaccataccagttcgcctttggactcgtcagaagcgcttacaggagcttctacgacatcaggtactaattggatttgatcggctacttccggcgcgacctctttaacgtactccataaaatccgcagaagcatcaataaccacatcgggaacgttcggggcttcgatgacaggttcacccatagtcacctcacctttatatgcaacgatttccggttcaggggaatcgatcagcagttccggtttttcttcatcttccggtaaagcagcaaccagatccgccagcatgttatcgaaggatttttgtttgttcagcttaaccgcaaacacagtcatagcgtaatcggctaaagcgcctttctgttcttttgcgtcgagggtacggaacccatcaactttttcgtaatcaatgttcattggtatctccaagtgtttatccaatatttatgacataaatacgtatatactttgtacatagggtaatcatagtggatattgaagtcaaatttttaaacacaagccacgtacagattcaggcagaaccaaacattgtctatgaactgcgtgactatttcagcttccagcccccaggctatcagtatcaggccaaatacaaatatggtggatggaacggttacatttacttgatggactacaacgggaaactcccgtatgggttagcctatctggtatccaaattcgcagaatcacgcgggtattcaatctgggttgatccaaagatccacgaaactgaggatatcacgcaagaagattttgataagtgggttagcgaacatccggtttatgacggcgacaaacagatcgacccgtactggtatcaacgcgaatcagtgttccacggtatcaaaaaccgtcgcggtgttctgaacctgccaacatcagcaggtaaatctctgattcaggggcttatctctcgttggtgtctggaacattacagcgggaaagtgttgatcatcgttccgactaccgcacttgttgaccaaatgatcgaggacatcgcaaactatcgtttgttcccgaaatcggcaatgctgggtatccgttccggtacagcgaaaaacagtaatgcactgatttacgtttctacctggcaatcagcggttaaaatgcctgccgaatggttccaacagttcatgtgtttgatggttgatgaatgccacctctcaacaggcatgagcatcaaaaagattatcgacacgatggatcaatgtatcttcaaactgggcttatccggttccctgaaagaagggaaaacgaacatgatgcaatacatcggtgcgttcggcaaagtctttaaaccagttgatacgcgtcgtttgatggatgatggacaagtcaccaacctgaaaattaacacgatcttccttcgatacaaagaagaagaggtcaaaaaattgaagggtgcggactaccagacggaaatcaagtacgtaaccagccacacacggcgcaacgcgtggattctaaaattagcgctcaaattagcccgtgagaagaacgaaaacgcctttgtgatgttccggtacaaagagcacggaaaatggctgtacgagcagttgagcaaggtttacgataacgtggtgttggtcaatggtgatacagacattgacgatcgtaacgaaatgaagaaaattgcagaatcgacgaaaggtttaatcgtcatcggttcgatcggggtactgagtacgggtatctcaatcaagaacctacaccacatcatttttgcgcacccttgcaaatctgctgttgtggtgaaacagtctatcggtcgtgtacttcgtaagcacggatcgaaagcgctcgctactgtatgggatatcgttgataacctggctacgctgtcaaagtctaagacagccaaaaataaatacagtgcgacaaactacggtatgaaacatgctatggaacgtgtgcggatctacaatgaagaacgattcgactacgcgatcaaacaggtagaaatttaagaggccaaaatgaaaagttttactacattcgtaaacgaagcagcgattgatgatttcatgaataaggttgcttcgtgccggacactagaaggtttgaaagaacttgaaaagtattacaacacccgcgtgaaagaagtcgaggttgcagcatccgatgacatttcaatgcgtgacgcgatcaagggacggcgagaagaactgaaagccgaacttgaaaccggagaagaagagaagttttaaaaagaaagccccaaccgaaaggaaggggctttttaattttgaagcatagttgatttttaacgcggtgtcgtcaccgctattctaaactgcgtaagctgattaatcagccagccatgccccacaaggggtactgtgacacattcgccgcaacatgcaatcgtatatttgcggggtagtcaatcgtagttcgtgccgttgcacactgttagcataaaggttccaggttgagaaaaaaatcccaatcacgaatatatgttgcattccatataggccattaggtttatccgattatgaaaatgcatccatcggtaaacatgcccttgccctacaattatatttactgctataaatctgggcgttcgtcttcgatacaaccactttcaaacgaaattcgaagtgcatgaaccctggtcacacattcttccatcaatcccagcaaacgaaatacttcgttaaagtcgatttttgaatagtctttcatattcacacctacagcaacatttgaacttcgttcagatcgtcggcttcattgataccgcgatcattcctttcgttgagatattgcaaacatacgacaccgcagatcggaccagcttcattgacaaacgccgtattacgggagttcatcggttgtttgcacacaacgcatttgcaatcaaattcttctgccattttatgcaccactctcaagtttacggatctccaacatgtttttgatggagtagcctttgttcttaacgatatccagcgcttttccggtaaactctgcaatcagttcgaagtattggatcagcttgttaacttcaacggtcttaggatcaccggagatagcaattttgatttcacccgaaccagtgtaaatgacatcggtcatttcgctttcgtgtctaccagtgtagaacagtaaccgatcttttacaatcgcttctttcttcgcctggagttgaataagttttttcttagcattcgaatggtatcgaagccattttgaccaaatcttcggaatgtctgctgattcgctttgtaacttcaacggatcaatacgcatatcctcttcaagttcagcctgtagatcttcaagttttagttcagccatgtatcacctcaaaacaaagtaacattataaccagttagatcaagaagtcaaatctacgagcgaagcgagtacatgaacgaacgtagtgagtgaatgttggttaaaaagtatacggaaatgtactgttttctctatatataaaatataaatattataaacagtacatcgtacttacccatcactcacttcgttcgtgaaaactcgcttcgctcgtttgaccttatagatctttattactataatggtcttctcaaaacaaaacttgttaacccagtttaggtaatttaatacctacgatctgactcagcttagatttacctgcaagagcagaccaatcatcacctttgatcaggcgatcagaatcactttcagcagtatacgggttcacggaaagaccgtaacgcatcagaatagcaacttttggttgcagggatgccggatctacggatactttgattgaacctgcttcgtcagcttcggtatacggagcgaagaacagagagcctacgtgatccatatcacccagatcatatttgcagccagtcagcatataatcgaacgggctgtttgtgtctgtatagacataataaccgttgttcagcttacctgttgccagtgggtgttgttcgtcggtttcgtgcatccaaccagacgcagccagaatgcctacaacacgcgctgttgcgaggacgtaggtagcatcaaatgaagtcgttctattcatttcctgccccatttcacacgctaattggtacaggatacgacccaatgctggagcatccttcgcggtgtatgcggtagtaccgtcaaaaataccatccgtaacgagtccatcaacgttgtaacgtttggaaacggtgatcagtgtttgaataatgtctttgttgacttcttcacttgccacggttcccagaatgtcttcgatcaccccatcagcttcgaactggttcgcttccaaatcctgcatcagttcaaccgtcatttcggttttaaacttacgcgagcgtaccggaatattccagcgatccatctggaaggaggttgacgcgatatcttcactggtttcatacttagaagtatcagcggcttcgctaaccagtcgaattttgctttggaacacagctttcatgatcgcggtgtctttgtcagtatccagagtgttcagggtaatcggtgcgataacctcataaacaacgtcagtgccgtcatgcttgaacaaatcacctttaacgtaggctttagtcagatcgatttcgtcgatgtctgtacgtccagagattcggcctgaataggttgcagcactggagaaagtcatatcaccattagggttgcgatagcgaacaccgaacagtgttgcaacagggagttctgtttcttgtacagcaaccagttcatgatagatcaggttgttaaccgcgcgagtcaaagaaaccagttctgggcgcgtgttctgtacgttgatgtcggtcgtgcctgttgcttcgttgataactttttctcgtttaccagacggaagcgcagactgacgcatcaacttgtgaattgtgtagtgtttatcactcatttctttggttcctgaatttatagggagtatattgtttatttatgcaacgaatttccattcaggaaatttgtcactctttaaacggtaatcaaggccagatcgagaaagccccaacgctttagcagcatcagaaccacttgcataaacaactccatctatcgacacagaacggcttattttggccttgtgcgcgtctgtgagcttagatccggttctgtcgaatgcagaacccttatacatagctttgatagtctctgaacgcttcctgttggattcttccgattgtttctttcctgtttttatttttgaaaggtgttcttttacttctggtgtcattctttcacgagttcttttggatatttcatgtttcttttcttctgaatgaaacattcccagcataggaccaccagaaccacctacgcccatattgtacacatcgggacgattgacgaaatccaaatttacaatctccctttccttttcatacatttcttcgcttgtatcaaacacgaacaaaatctcttttacgaaattatcaattccatattttcgttgggccgctttgattgctttaccagaacccatgtatgaatcgttaatatcatcagtcgaatgtgcgccgatatagatcctattgtttatagtgtttgttattttataaatgatgtgtttcataatatagcctcaatagttttcattatttatataaacaaaaagggaacccgaaggttccctttaaaaagtcgttgtttttcaacaacttataagcccttaacccagaccttacggaagtatgcgtttttaccgcacatttctttgctgatcataccagaggtgatacgatctgccggagcctgagagcgagagttcgcaaacgggttgatgccgataccgtaacgagttttgaagcccattactggctggaagttcttaggatcagaaccacgcagcggagtcagcgcaacgtatggagcgtagtagataccagcatccatttcgttatcacccttgtagcccacggtgaagtaatcctggcgagcgtactggtcgatgtacactttgtaagtgccacccagtacaccagcgaataccgctttagtggtgtctacgttcagagttttctggagaccctgacctgccggagtgatgccgctgtcgatacgagccagagcggaaaccacgttacgggaagcgatgatgaagttaccagcaccacgaccagtttgacgcgcgatttcgttcgcttctttgtcgatctgaatcagcagagctttatagctttcaccagcccaacgagcgccgcgaatatctactggatcttggaagtcaaacgcaccagctttagagcctacggtctgggtgaaaccagttttaccaatctgcgcggtgtagttgatcaggtcaacgatttcgcggttgatttccagcatgatttcagttgccaggattgcagacagttcggcgtcagcgtccataccgtgtacagcgcgaagatcctgcgccagttcaacggaatactgtgctttcagttgacggctacgagcttcgataacctgtttgtcgatacggaaagccatttcgttccacgggttagcgctggaaccgttgaagttttcctggagttctgctacgctggtagccataccttcggaaatttcagccagagtgcctttctcgttttctgcgattacagcagcatccagagcagcagcatcagcaccagttacggttacgttgccggaggttacgttctggaagtacgcgacaccagtttcctggaatacgtgcttaacgatagcgccggaagcgatagcaacaccagttgcgatagcagcaaacgcggtgtttgcaccttcaccagaatacatggtgtctggagcgaacatcggatggaatgcttcacgaacgtttgcaggagtaccgccagccagaggatctttaccgtatacagcacggagtgcgaacacctgaccagtagggccagtcataggctgaacaccgcaaatgtcgaatgcgatcaggttaggaatcgcacggcgaaccataccgattacagcagggccgatgttggtgattgcaccgctggatttaccagaggcaatgttggttgcgtcgtaaccgtggtcacccgcgatctctgcttccgccaggaaaccgccgaaggattcaatgattttttcgtcgcgatatactggatcagtatcagcatccttttcctgagtttccagaattgctgcaaccagttgttttttggatttggtagcgatatccggtaaaccttcctgagattccagaagatcgttccatttttccatcaattcgtttttcttagacattgtttcttaccttataagattaggaaagggctttagccgcttgtacatatttattgatcttcgatttctctgctggaggtgtattttcattcaccggaacaaagtcatctttagtggttgtctgagtagtggtactctcttcaacctgtttttccgctttagtcgctaccatttcaacgattgcggtcagtttggattcgaacttgtcggaatattccaaaccttcgatcaggttctgaaccttttcaatttgcgattcagtcagatcttttgttttttctgaaacgatggtatcgcgtttcatgttggcgatctctttagcctgagcctgattagcttcgaacaggcgtttaacttcctgctgattctcggtcagttcatcttcgagttctgcaacaacatcaacctgcgcttctgggataactacgttgtgttcaacgaacagttctttcattcccattaccagagattcgaacagatcggccttgatatcacgggacacagcttctttgttttcagagagccattcctgcgcgatgtggtcgaagtatttattcgcatcttcgtacagtttattttcgatttcgccagctttttcggcaacctgggcttcaaccagttcatcggagagttccgcgatctgggcgatgtgggtttcagcgagtttcgcagcacctgcttttacagcttgttcgaatacagtggtgaagtttgctttcgcatcatcagaaagttcaactgattcgaaaatgctgtctaactcaactggggtatccaggttctgggcttctgccaacagttgttctttaagcatttctaagtttcctgtttgatatgatattatttatatagacttttcaaacgttcagagagttttctgaaagcgtcatcatcagcactattattctcaacaagcggtttgcttgactgagattcggtaatcggcttaacgtaagcatctggagcgcttggcccccaaacaacatcaacgcctactgccaatttaaacccttcttgtacgataccgtaaccttttccagaatcggaaagtttacccagtccgcgagaagaaacacctggaacccaacctgcgcgaattaacgccgcgagtttatccccatcaccgttatcaccttcgacaacaacagcgcgaccccaaacgtcattacctttccaccacaatttttcaattaggatgcaagcattacgcggatcgacattcggtcgcggcgggtgattcatttcacccagagcttgacgggtattaacctgagttctgatataatcgtttactgcttcttctaatacttttttcggatacagtcgcttattgcggttgactttttcggcttgtaggaaaataccttcaatccgaagtttaccgtcttttttcgactcaccgaccgattctaaaattgaatcggaaatatccgcacaaggtaaaccccattcctcgattagcagcatatcgccgttttcattgagttgggattcattcatatttatagccctaatgcggcgcgtttacggagcgcttttttacgcttacgctgtgcgcgggttgtaatagaagggtttgcacgttttgtttttagcgcacgacgcgcaatttggcgacgttgagatttagttaaaccagttgtttgatacgcattacgttcacgagttttgcggtcttttttacgttccacattaccgcgcgaatctacgtgtttaacaatgacttcatctaaactcaaaccctcgacaatggacatcatagccagggctaaatgaggttcattgtccgccaaattttcgatgatcttcacagtgccgtcatcgatccccagaacatcaacacgggctttcgcttcggttaaatggggttcgagatcttcgacgctgatttcttcgagttcgagttgcattatttacacctcttattcgtctttatcgtcgtcttttttatcagacggctttttgtctttgtcgtcgcctttatcatcgccgcctttgtcgtcgtcatcgtcatcgttgtcgtcatcgtcggtttcaccttcgatgcgtacagcttccgcgagttcaacgcgcatttcttggcgaagggcttcggtacggtcttccatgatggaatagaattgcttcttcgcttccaccagatcaccgcttttgattgcttcgataaattctttcatcaaaagttttcctcttcctcttcgggatttttgaaccgttcttctttggattcttctttgatcagcttcgcttgttcgtcaatgtcttcatcagacattcgaagaatctctttcatgatgtatttatgggatacatatttccctactacaccttcaacctgtgacattaacgttaggcgacgttccatgatctcaatatctttcacttctgcgtaatatgaatcttgctggaaaatgaaggagattttgctaacgttctcttcccattcttcctctgtgatgatttttttcgcgatcaggttagtttttaacggatcggaaagcacagggctgaactgaatttgcagtgtgcggataaacttactaaatttcagttcatcacgggtgatttcgccaccaccaccaatttgcatacccccatcatcacgaggcatacggcttaatggcacacgcagtgattcatagagcttacggttaaaccatttgatatcatccatatcagagaagttagcaccgcctggaagcgtgtctacttcggtgatagctttaccgtcacgacgcatcaaccagtaatcttctgtcattgacaggttgttttgctggttcttaacagtacccgttttagcatcgtacacaacgcggtttttaagcccctgtgcaatgttatttacgtactgtgtcgctttggtgccacccatctgacctacgtcgatgtagaacacacggcgttcaggtgcgcgggtgatacggtagatgaccatcgcatcttccagtaaacgcaattggtttgctggcttgactgcgcggtgaagatatccgataatgttgttactacaatcttccagaccagaatgcgcatacacgatagcggagcgcgggattttaaccttctggttatgctgatagatttgcccgttgtatgtatagccagatttaggagcgctatacacgaaaaattcgcgataaccacggaatactttcacgccaccatcaagggtttcagtgatagattcgcggatcagttccatcgaacgcggatcaagttgacgcagttcgcggatacctttgctttcgtctttatgcatgattttatggaagtagatacgggaatccacataccaatcacggaacagacgcgcacccatgttatcaaaatcatagatatttagaacgttatcaaattcttctacgattttgtcctgaatcgccttactaaaatctgttttggcaagatccaaagtaatgatatctttgccctgttcattcacgatcgcatcgtcaataatttcagaaacagcgttttctacttctgggtaagacatgatgccgcgatatgtattgattaattgttctttgttctgaatcgccggatcttgtccagaataaaactgctggaatacgcttgcgtatttctgattagtcagatcagtttcgatttcataagcaccatcattatttttaggaggcgcgaccgaacctgtatcattttttaattgctgttcaagatctaattcgtcctcacgggcgaaattcttgaaaaagctaagtacattgccaaagcccaaaaagttcatagtaactccgaaaaataatgataggggtattgctacccctgtatttataacctttattcccaccagtccagcgcgaacgtaacctcaaaggttgacacttcgttgttgctgtcccagtccagggtaacttcgcctacgttagtagggaacagcccgtggatggtgtgatcggcggtaatttcatcgttacggtttttctgtttcaccgtagcggtttttttgtagttcgctggaatatcaccactaatctgatcgcccattccgtgcatcatgtttgaccatgctaccagagcgtcacgcgtattatgcgcgtcatcgttatagatcgtgattgtccagtcatcataggtacggtcaccagcaacgttgattttgcggttttggtatcctaccggaactttttcaactgtagccgctggcatggttgccgctttacacttgaatttaaagtttttgcccagatacgggatctctacttcgaacaggttcggacgtgcgaaatcaccggattcaaaggcgcgtaaaatgtcagtaagcatttttaacctcggattatttatgggggcttttcagcccccttgactttatacggcttgcggccctaccagttcatcgaaatctgcgcctgtagacgttgctacgaagttcagagtgatgtagttgatagaacgaggcggtttcacgtagaccgttgctacaaactcgttacggtcgattacgtccggcgtgttgttcgtggtgtcacagattacacggtaatcgtagcaaccacccagcgcacgaatattagtcatgtactgacctgtatccatacggaacgaagaacgggtgaaatcgtcgttgttttcaaacagtttgtatttcgcgttatcaccgatgtctttcttgatcatgttgaacaagcgacgaacgttgatacggtcaaatggactcggtacgttagtcagtgttttatcaccgaacagaacgaagccggaaccacccgcgaaaccagttaccgggttaatctgaacctgatacattgcgtcacgatgtgctgtgcgcggttcgatagccagtttgatacagttgcggatctgaccacggttgtaacctgctggagacatccacggttgagaaacgctatcagtgtaaacacacaggccagcgatatcacctgccagcggaacccaacggttcacgtcattgtatttatcatactgatatttatagttaccatccaggaagccatagcttgaacttacgttcagattgttatcaacagcagcaccaccactgagtttatagccagtacgccattcaatcatgttatcaaccgcagttgccagcgggatattcaccagaagtgagcgcggaggcgacacaaacacggtacaatcctgacgttcatcaccgattgaaataacatgtttctgaacggtagacataatctctacggtttcgccagcacacgcaccagcaatcaacagaggcacatgcagagcttcgcgatcagcgaacatatcccaaccattcatcagttcatcagcgcctacagtatcgtttgaggacaaaccaccgccgaactccaggataccggagaagcctttaggccagttcagggaagtaccgtaaacgtactgagagccaccgttcgcgaaaaagtcatccatgaagatgttgacaccatagatatctttatcggtcttctcggttgacacgatgaaggattcctgtacaataccaccacgacgcacaacaaaagcgtactggttatcggtctgtggcccgtaggtcattacagaacgaccgctgttcttaacggaaaccccagaagggtagccggaaatcatagcgccagaatcgtaagcagctttggagataatctccacctgaacagttgaacccagttcaccaggatacagagccacaacagacggcaactgatatttctgggtaagagtctggaaagcggttccctgaattgtttcttttgcaatatccaggttcaacagagtgatcccagaatcgctttcgatgccgtcaatcgtaatcgacgcagaaacaccggaagactgagaaacaatttcggtagtccagccagtagaaatatctgggtaagtaccaatctgtttagcacgggcaacgattttttcgcttggaatgattaccgagaggatcttgccgttactgtcaactttggacactttacctttttcttctacaacaacgctgttgtattttactttaatagtatcgttcacagtgtagttagaaccctgtgatgcgatagttgttttgatctggttaaaaattgcgcttgcgtttttagcggcatctttatcgacaacgcgaaccacacggagatcattaccgtactgcaagaagttaacagcactcatgaaatagtcagcggtcaagttgtcgggggaaccaaaatagtttaccagttcgacttcgttagaaatctgacggatctgataagctggcccccatgaaaatttaccgacaatggcagcgcgaccagttgaatttcgaacaacggtagattgtaccgatgtttctttggtttcaatacctggagattgtaaagccattatagaatttcctctaatttatataaacgaaataccgtgagaaccaaccgaaatcgtttcatcaccgcttgtaacgataaccggacataatgcgtcttcgtatagctgttcgcgttcccgtgcaaaaacttcattggctagtcttaaatcgtctttctcgcagaattcggcaaatttcatttgagttgtaagccaaccgaaacaagcaagcgacataacgaggtcgtcgtgatatccttcttccgcagcccacgaaacgcctttttctgagaaagtacgaaattcgagtattgtctttttgttatttatgatcaatttatctttctcgaccaggtctttcagcgtcgaacatcccatagcttttgatcgcttagtctgtttcatacccagatcgttgtaactgtcacaaataacattctcatattccagttcggaaaacagagatttggcaactgaatgccctgtgctatttagctcaatgtaaatccatgcctcgttatacatattcagataacgtaacaggatgtccggcaaaataagatgcgacgttttgtttgagtgatacaccgcaacctgttcaaatggcatcgtcgtaatgtcgatgatgtgcattgcatggtaatcctgtccgcgaccttccgctggatcaagcaccgcaacatatttatgcccctctactggacgtttatactgataaaagttcgtttccgtttcatcaatatcgatccatgtgagttttgacaacttccagccagcgatcagagttccactggttcccatgaattccgcgcagtgttcctgcaagaatgcctctttgctggagccagcgatcatcttagcagaccacgaataaccgtcatcaaatacgccgttgtcaccgtctgtatacaatcgctctttaaccgatgtccagatcgccgtgtaaggcacgaagccggattttccttctatagcagcgttccagatatcatagaagtggttaagcccgttaggtgtcgttgtgataaggattttcgatttacgaccagaagaaattactggttgaatcgctaaccacgcatcaacaaagttcgggataaacgcgcattcgtcaatgtagatcatcgcgaaggagttaccacgcaccgcatcgggagaagatgcaaacgcaccaattttacatttgttgtcaagttcaatagaacctttgttccattcaacaataccaggctgcaagaagtcgggcagtagttcgatcgcctgtttggtacgatccagaacttccgcagacatcgaggctttgtgagccaacacaccaacatatttatcttcgttgaaacacacgaaatgagccaggaagattgcaacaacggttgttttacccaactgacgcgacaggttacaggcaaccatacggtttttgtgcatttcgatcagcatttcgcgctgatagtcacgcaactgaaccttgattgtaccatagtcaatgtgggtgatcgcacaatatgtttcagcaaaataaacgatatcatcacgacatttcacccactccatcaacatttgttgcgtccatttagtctggatatacgcacgtttcaggtttgggttgccgttatatcgggttttcttgttgcctttatttttgtacgtggcaaagttcgaactgtccttagactgaatatcgaccttttgaatgccgttaattttcaggtagtcactgaacgttgtcggataccattttttatcgtgttcgctttgtgtccactccatccccaattcatcaattttctttttcagatatttgggatgcattaatccgatagggtgatctgattccttactcggatcgatcgtcggttccatttccatcagggtttacctctacagcttcaccattaatgaagccctctttgggttcatatgcactgccgtatttctgcattagttccgtaggggaaccaacaaatacggttgcattctcgatattcaaaccatcaccaccgcctttttcagcgcctggttttgtagtctcttccgtaatctcacgcatttctttgtgaatcttcatcaggccaatgtttgaaacgtttaactgattcatcaggcttgtgaatacctcgacgtggcgaggtgattcggagttcttcgcgttgtgtaatgcaatctgcgccatatccatgatcatctgattcatatggtgcgcagtcttacgcgcgagcgtataatcctcttccagatccggtttccggtctgctggatgtgattgaacgtcaaccagttcaagtttttcgtaaacaaccacatcctccccagactcaacgccgccagggagggaatcaatattcagcaattgctgcaaatctaatttttcatccattctcattccctcggcttaggaggttcatcaccagacgggatcggcttatcgtgcgagtacgtctgaatatattcttcgcccgtgtagtcctgcataggcaaatctaccggatcggcttgactatccacggattcaaagttatctttatctaacgggttcatgttagcgaagaaatccgtgtaaacggttctgatttcgcctttaacatcagttacaggcgggtacagataaccctgtaattcaaacataaatgaccactcaacatgacggcgttgatttgcatcgccctcgaatgtggtatccggcgcaaccgattggagactgattttgatgtctcggtcaactgtgatatcgttcttatgcagttcggtaatcttacagttgaagtgtggttgaaaatatggcaaaatctgttctgcgatctggaacatatcatcttcatatcgcgtatacacacccagttcgaaaatcagacgatatggcacagggttaaactgtgtgatcgtttttcgtggggttgctaactgtgtcattttttggttgaccgcgatactggttttacggattgcgttatattgcagatccaccagtgataagttcatgcgcggtaaaatcgtttccgttttagcaacgttttcctgactcaacgtgtagttgaatttgttcatggaagcgagaaacttctctttcgatgcataggtgatcggaaccttgatgtatttttcttgatcgccgcgtactcttttaacctgaacatggttaaacaattgtcccataagaacaatgtagttacgcagcgaactattataccagtatccaaaaattttctaatccccctgctggacgcgtccagacttacagttatcaaagtgccagcgcttcgctgtattagcggcgcacattatcccacaatgggggcattgtaccttttctcgttttttgcctttgtgagcagcaacgagacttgctatatgttctggtgatagcttctttcctttatgaacagcaccaattctttttctgaattcgtcggtatggtttttcccgtaaaatgggttgtttttaccgtcatgtttgcctttcatctgttcttttttaacaatgcgcattgcttttcgcgcctttgtcttttcttcaagaatgaactgctgttcttgttcagataacgatgaatagcgtttgtgttcataggtgaacatcatgaagaacgcaagaatcattttaggatcattggtttttgctaatgtcctgtgggccatcaaatgcttcattatatcaagttctactaaattttctggttcgtgttcgaattcaggaaataaagaacgtggtaatatatgatgtttttctgtgtgttcagtttttggagaagcctttatgatatcaacatactcaacgtatagatcatgaggcaaccattctttaagttttgtgtatatcataaaattctctttgaagagggtatagacttccgcctatacccatataacgtatttatggcagacttgcaaacggtgaaccgcgtccgttgacaacatcaaaagattcgatgaattcatcaccttctctttcaaattctttgtcttcttcgtactgttcaatgttgatatcagccagaccgtcaagatttcgaatcggttcgagatccagttctgcatcaggttcgatatggattccttcatttcgctgcaattcaggagccagttcttcacccgtgtaaatgaatttcgcaaggttgattttgcgttgaggacgatcaccgaactgatagaacggatcggcttctacccacgtaatttcaaacaagctattgtccatcgggaaataaaccaaatcccccagaacaggaataccaccatcagtttgatgtgcgaacaaacgagggttaattaccagtgtcatttcatcgtttgaactcaacccaaatttactaaagaaatctcgttgcccttcatagttggcatacgattcaatataagcagcaattttccatgacttcgtaaatttagattctcggtcttctccaagaatcttatcaatattcacaaagtcgcgccggacgtaatacatatcaggcgatttcatctggattgattctgctgtcaatgaatcatgtagctgttgtgtcgggttgtatttgtaccagtttacatacgggttagtgacctgatcctttaagttacgatcaaccccttcccccgtagacaactgagcgaataaactttcatcccagttttgcattattccccctacaccataatgatcggtactgcgtcagacatcgaaattagttcatcgcgcagactttgcagtttggtttccgcttcctggatcagtcgcgtaccatctggagcaacaccaccaggcaattgcatcccctggaacttagccagaatttgtccgttgatctctttcaccagtgcggtagagtagtcttttacccagcggttgttatatgcagacgttccgcccgtaacagttgaaccctgtcccgctcgtacaccgcctacaacgctgttatacgggttttcgtagatgtcggctatggattggtcttccactgcgttagaacccgctgtagcgtatcctgcgacgcttcctacggagctagggacatcaacgaaggaacgaaccatcgcttcaataacgataatgtcgcctttgttcacctgcccccatgcgcagaactgaccagtatcatcgttgaaccagtaatcaggcagtggagccagcaggtcttgcattgagcgttgataggacatcatctgggtaaagtatcccatatccgcaccgtatgcgttcataccgtacacgcttgatgcacatcgaccgcccagagaaccaccagtaagccccattaggaaatcggtaaaccacggataaaccgctgtcccgtccattgtggtcaatgaacccatgtttgtgcgcaataccttcgtgatcgcgaagatgtgttctttgctcaagtcgaatacgttgcgcgggttatcatcacccagtgtcaaaatcagatacgttttgtttgtgccgttataatgatattctgcatacaggtctaaagcgcgttgaatgcagtcataaatctgatcttgtgtgatttcgattttgatgattggtgcgcccagacgacgaagaatttcatcctttaactgttctggattgttcgtaatcatatgatcctcaaaaggggcttgcgccccttgttaaaattatgctaccgtcacagtacattcagcagaggtaattttggttgagagtgcatcagtcacttcaactttatatactcccgcttctgctactgtagccaggcttgcgccagtttccccagtaacttcaaccgtatctttaaaccatttgtatgtatatggtgttttgccaccagtaacaacaacggctaaatccatattatcgcctgttgtgtaactcttcgttgccggaagatccgttgtaaacgccagagccggacgagtagttacagtcacagtcgcggttgttgaatcgttggtactgttcatcgcgtcagttacggttacatagtaatcacccgcatctgcgctggttgcagcagacttgacgatagaagaaccagtttgaccagttaatacagatccgtctttatgccatacataggtgtatggagttttaccgccgctaaacacaacttccagattcagaggatcaccatcaacgacagaaacatcactcaagtttgtgtcgaacttaggaatcggatatacggtaatgtcaagttcatcagaagtaatcacggtattttcagcgtcagttacgacaactttatatacagcggaatcacttgtagtgatgttctggatcattacacttggtgaatcagttccgatattttcagtccctttcttccactgatacacgtaaggcagtttaccacccgtaacggtaacagataaagaaatatcatcaccctcgatataatcggtacgaccgacaaggttttgagtaaatgacaatggaattttcttcgcttcgtatttggtatccgcttcaacttccgtaatatacggaaccagagcgtcagcaacatcctggtgagaggctttattctgttccagatcatccagacgttgttcaacattaccgccaccgccagcagcttcgagagcagcaacgcgagtagtcagatcagcgatcagcttatagatacctgtttcagagccagcagttttcacaccgattgctgttttgttgtcgcgagccgttttctgaataccatctttgaggaatggatcagaactggttgcgtcaccataaacagctttacccatcgcgatattagccgcaacaagtccagttgacgtattacccacaattgcggtaacatcaatcagtgcctggtgatcgtctcgctgtgtgttttccacattaagcagacggcctttgatgcttgttggctgggagtcagtaccgatatcggtcataacctgtgccatttcaccgcgcagaccatcatcacttgtttcaccaacgatcatattcagatcgctaatgctacgtttcattgtgctgatatcgtaacggatactacccggaacctgcgagttaccaacagcgctttccagaaggattacgcgaggcagaacaccaacaaccggatcattcatctgggtttgcagagtaacgatgttcgtttctgccgctttcatgcgtgaatcaatactacctgatccgcctgtacccgtgcgcccgatatacgtgttgatgtttgacagttcggtgttaatgccagtgatatcgtcaccgatatggttcaatcgaacataaactgattcaaacgttgctaaatgcttcggccccatttcgttacgcagatccgtaacttcatcagtcaattgacctacatctgagtttacccagtcatcttccagcttagtaatacgtgcttcgtggatggataccgcctgagcgttcgccattaccttgtatttcacgccggagccagtagaggacggatcaacatcaccatcttcgttgaagcctggatacgcccccagttcacctttcaggaaaatgatatcttttcgaatcgtgcgatgtttaggatcggttgttgcatcccatacaccaatttccttttcgatatcctgaattttcagagtgtggcttgctgtagttgcctgtacagaagacatatctactttcagcacgtcaacatcagcgacaactttatccagtttgtcgatcacgctttcatcggagattgtcgcgaggttttcggtaatgaggttaacctgatcgataacttcgttgatttttgatgtctgggtagttgtgtttgcttctaattgtaccgcgttcttttgaaccagaacaccgcatctgtttaaagaaccctcgttagtggttttggttttagcaccatcgagagtttcgccgttaacaatccaattgatctgggtttgtgtggtgtccgtagggacaccatcaacaaacgggatctttggtaacgggttaagttttgaaatcatggattaacccctttatcgtactcgaattacatagttgactgcaacgtttttcattcgcgtttcgtttccgccagttgccatagctttagtgtatgctggattcagttgcataattaactggtcgttcttttctgaatttttcaattcgtatattgcttcggatgacggaagattaccaccattacgatagatcatctgtaactggtgttcgtgggatttaaacatatcatcctggtaagtaccgaaaccacgtccaggatctaatccacgtccagcatcgaaaccgcgagcagcaacaccgcgcatatctgggaggttgaaaatatccccagcaccgccgtatgtatacccgatacgggaaaacagaacagggtatgtgttgcggttcattgcgcgtccgttacagataaaaatatttccatagtcggagttaaatgcagatagcatcatacaaccgatcggaatatttacttcaacgtcgctttgtgtctggtatttattgtcagcaacaatagaaccctgatacagcgcaccgccagtgatagcactgtttctgttgcttggaactacgttagcgccagcagacaacgcggtattcgctaatccggtgttgacatctgttgataatttaaccaaaccaaatgcagagccagaacccttcacagcagcaagtttttgcggagtaattgcttttgtgttatcagtacccgcgtttacttcctcctgtgtagcgatacggagtaagcctaaatcggtttctgttgcagtcagacgaataaacgtgtatggtgaaattgcgaaaccgtcacggatagtacctgcgcggacttcggcaactgttgccaactgtaccaaaccgaaattactttcagttgcgtttgactgtaccggaaccatagcagcaattgcttgcttcactttaagcggagtcattgcggtcgtgtcatcagtaccagacgttgcctgtgcagtggttgacagttttgcagaaccccagacgttttcttttgactgacgggtgttaaacacatagttcaatgaacgcggtgttaatgaaaccagatcgttcgttacggttactgattctgcatcagttgcgtaacgggtgtacccccatacggtttgtgatgcatgagggttttgtagacggtattccagcagagccggagttacgatcgtctgtgtgtctgtacctgcatcaatcatttcctgtgtagcaatagcagcaataccacgcacaccaggcgcggcattaggcaagccaacatcagtacgcgcccatgatccgatagatgcaagcgcttgctgaacattcgtgtacgtgctaggccattgcgtaccagcaggatcaaatgtcacgtaaacggatttatcgcttacgtggttaattgtgttgttcatttattgtccttatgcaatacgcttgaaatagtaaaccgtaacagcaggagtaaccggaagatctgcttggcctaatttcgaccatgtaccataaccagatttagcctgtacgtcgatcgtgcctaccatactgatcccattttcggaagtgttcgttacaggatgcggaaccgcgtcaataaaacgaacttctaggatctccccatttaaaccctttcgagttaccagatcgaaatatttttcatcgttcacaaattcagtaaatttgttataaacggtttcgcatacggttgatgcgttcgttgtgttgtcaaaaacaaacgggaacccgtaaacatgaacagtcgctttcgtctgatctggatctgggttctgaacagtaccatcaaacgtaatgctttcgacctgctgaaccgcagacggtgaattatcttctgccattgttactaccccattaatagggatttgttcagacagagaatataagtcatcaattgctgattgtacgttggggtattctaccccttttcgaagttgatcgacgtttgcgccgccaatggtacgtttaccgccaatcagcggtaatttcgaacccatttcatattgcaaaaaatctgcttcgcgggaagggactttcgccccctcccttgttttggaaataaactgtgtcatttatgctacccttatccagcggtgaacagtaatatacggcgggagcgtttttagtttatctggggtagtgttaccctgatttacttttaatacatcctcacggtatttagtgtaacctggccctgttgcatctggatcaacctgacaaccaccgataataatgatcccgttgtcatccttaatcagcaccttatcggttgaatggatttcaggaacgttaatcggtttaatttcataaccacgttcgccaccagtaccaccagaagtgtgagttggttgacctgaaccatccagatcgttgttgttcaaaccgaaatcactatctgcttcgtcggtagtccatccagcaaggaacattccttccgcataacgtgtccagataccaaagcccatataatcgcctgggttagcatcgttgtgcgcgttttcgtagattgtcccgattgggtgaataacgtcaaagaacgcttgcaaatccagaagacgaccactaaacggttctgcgacttttcgcgcggttttctgagtcgggttgttataatcggtgtattcaatctgattaaccagcgttacttcttcttcgttattcagataaatcttatcggtgtgttctttaataccgcctacaccgtcccattccattacagtgccgatatcattgttgaaccagcgaatagttaccacatcgcgagtttccagaggttgagcaaacttaataccagtaacctcggaatcaacaaaaatcagactgtaatcctgaccagaaggaacccacaaaccggagtttgcaatacagctatcttcgtcataaccttctgcgccctcacaaataaatgtcgggagatccgcatcacctgctttaacaagctgtcgaccgttcagcagcagttcgaacgagttcgggttaaccagaattcgcggactgataccaaattcagcagtggtgaatgtgagtttattcggcagatcgccaacccaaatttcaccagggatacttacctgttcggtgtcacccgtgttatatacgcgcatggtatgcgcttcatacgtcgctcgccatgcggcaataccatccagataggtaacgaattgaagcgtatcaccagcgttacacgggtttttaagacgtatgtttacaccatccagttcgatcagttgtccggcgctcgcaccaggtgaaccgtaatcgctgtttgatgcattaaacccgttcttgtcgtcgatgtacagcaagttaccacgatagtaaacttccagtgcgcggacgttgtaagagttaccagggccaaacacattcaggaagtcagtttgtccctgagtcgcgatataggtttctttcgctacagtagccagatccgaagttgtgattttgtcaacctgtttgttttcaacatattcccaacgaccaggagaacaataaaccagttcgacatccatcaaatctttgtacagttctttgtagttcggtgaacctttgatggtatctccgcttgcagggacgatacggacgttgtttgccgcccacttaccccatacgtcacgtaaacgaataaccttgttataatcgcttacgctgcctttaggaaggtttaccgtaatacggttgttgcttgtgttcagcgcccatgaatcaccaaagataggggatagcgtaggcgcggtatgcgttttccacgcacccgctggatgcgggatactcccatcacccagcttatcatacaattcggtaaagttggcgttagtcttctgaccaccacggcgcagataatcacctgcgccatcgtcaaccacgttaccgataataatttcttgtttcatgctgcgatccctgatttgatggtgtcaaccgctttgatcgagaatttaatacgatcttcggttttcgattgcacgtttgcgtaaacaacatcaccagcgccaacagtaaaattaagcgtatacatttcatcttctgtatttttaagaactgcgtattcggttgaataaacgcccttagccacacgatcgacggcaagcagaatttctgctgttttattgactgtgcctgtcatgttttccgcgtatacgagaagtttagcgccgctaaattcgctatatccaaacataggaatagccgttggtgatgctttcaaaatgagtttggtagtatcaacaggcattgtctttgaaccaaacattgattcaacagaataatcccatgtagaaacagaaccttctttcttcacacaccagattttaatctgagtatatggagaggttatgtaaagctgatcctgaacccctttgataccatcgccaacttgcggacggaatacaacaggacgatcaacagaaatgctaccgttactatttatgaaatagaacccttcaccgggtttacccgatggaagcacgaccgtaatcgggcctgttgaggtatccatatcatgcaatgaacccagttcgatcgggttgcctgaataataggttcgtggtagtttctggaaatatccggtcgcgtggagcagcattgtacccacaccatcattcgcagtcaacaaacgcacatcaccaaacgcgttgtacatgttggtgatgatttcgttaagtttaacaccgccgtcatacagcgggtcaccagttgacgggttgccgatctgccccacgtcaattaattttttaccagtttgatatgccattatggttttccttagaattcgaaaataatactgacttcttcggtctgatcaggagaacgaataatcggttgacggttttccatgtagatcatttgccctgagtcaagttcaagctgttctttcgtgtaatactgccccgttgcttttacttctggatcggtcggttgcgcctttttcagtaacgggtttacaattacactaacctgacggaatccacggttgccaggtaaagatgcttgcgggaagaacagggaatccatgtacgcacggaatcgcattgagtgaaccttcattcggaacaccaaatcatacatatctggataccacttgatcacgttgtcataaccccagcgaaccggatcttcttcgagttcattcgggaacggaacaacgatatgttcgttcgtgcatcggttaataaccacatcaggcgggatcgtgtagagatattcccagatatagccgtcacccatgtcgataccgttcgcttctccgcgtggaggttcgaccgattcgtgggtcggtgtccaaatgccaccaatgcgcacacattcaactttacccgtgatactggagattgagcaagaaccaatatcaggaacgtccacaacgcgatacaccatccatcctttaccgtaatcagtacggttataaggagcggagtttactaccacgatgtcattaatgtaaaagatttttgggttaggatatcgagtatcgccccagtctttacgcggaacgattgcatcaatcatttcgcctggtactttcgtcatcccgatcatatgcgtccacatatcaacgataccatctgtatcatcgttaggataagggggcgcgaattcaggatcggattcgttatccgcccattgttcagtacgcccgatcgacatatagatcgagttatgatcggggtcatccccgatcatttcgcgaaagttcatcatgttttccgtgcggaacttaccagttacaaccgcacggtagatgttttgttgagccattatgctacctttctctgagtcggtggattcggatcgcgaggattacccgcgtcgtctttcaatcgtttttccactaagttacggaactgagagtatttaaccgcagaactatcgaacagaggactttgatcaaatcgacgcgcggaaggtaatacaccattcagcggttgttcttcaacgtcatattctggtggaacatcgaacggttgccccgctttagggtgtggttcgtataatgcttcgcctgttacgaggtcaaatgtctggtttccgttaccgtccagacgggctacacgatcaggccaatacttcggataaccgctatcgaagcgatagtttcgaagaatatcaatgatcgtttcgctatgtgtcatagacaaaccggagttaatgaacaccgttaacatggtgatcccgataaaaccaaagcctaccggatgcacgaatcgtaaaacgtcatccttatatcgtgacgctggcagattcgaacgaattttcatcacatagtatgaacgcccacggttgaaatagtcgatcgagttgttcgccatttgcttaccacgcacaccgcgcagaatagttcccgtgaagttagtcttttcagacttgacaacctgcccttcaaggaagttcccgatcacgttatgcagagtcattgaccagcgtaattgaccgtcatcatactggcgttcgatatacgtcacgtttgctcttgcagttggtgtgtaaatcgtccggcctacgatgtcctgactaatattcgttgactgaaccagaatatcatattccagagtgttcgaactttcgatttctacggttacatcttcgttatacagcaatttgaacaggaatttatagcttgcttcgatgcctttcgttgagtaaaaatcactgcaacgagattcaaagaaacgtaccacttgatcgcgcttcgttttatccaggtagatattacggcggtttacttccgaccacagatattctacgctgttcttctcacgcggatatttgttcctgatcaggttcagcagtttgttatagtaggtgttttcacccagcgaaacgaactgcaaataatattcaccgaacttctcaaaatattgctgatccagatagctttgaggcgcaaagcgcgtaatcatatggcttaaatctgggtcaatcaaaccaggtgacagatccggtgtatacggtttttcgcgttcctgctgaatcagatcggcaatcagcaacgtgttatctggtttccagaaaatagttaagctgtcacgggcgcgataactcaattcaaagaacccaatgatttcgcctgaactcttatacaacaacacaccgttcgtatacttcgtgaatccggtaaacttaatgttgttaatgtaaatcgtaacatgtccgcgatcccatacctctttgttcacacgaagcgatgacgaagggccagcactatcggttacaaggctgtaggtgattttcggatacaccaccagaggacggttatcattagtgatccatgtgcgcacagagtcgcggaagaaccagctatagttcgcctcgttgtagtattcctgcgcaccaaatttccaaacagtcgggtcgtcgatatgagcgcgaatcgtcgcaaagttaatcgcaaggctggcagtatagccaggacgcaaatcatattttacagcaccaaccagtgcagggttctcgatcaataattcaggatcgggaagtgtgcctggatatttgtagttcgctacggaaataaaaatctccgtgccgttcgttgacatattggtgtattcatgctggatataaaaacgttcttcctcggtgttcccatacaggcgcacaaaggttttcgtgttttcttgccattgatacacaccagcagcagcggacggaaccacgttagcgggttttgtaggatcttgcagagcggttttcacttcacccgttacgagtgcatagagaataccatccatcacatccattttcttgacaacgatcttatcatttccagggacaactgtatagctgtcagtatcgaaaatcttttctccgaacgttggagaactcggatcggtgtcgatcggtgtctgtttcagtgcgatacgacgcacaacgtttttagcaaccacatagagccagtcatcggaacatgccattgcttctgcatatttcgatacgttaccaggcagtttagcaaatgtgttgtatgagtccacatcgaaatcaaggccagtctggttccccagtttggcaaacgtaacatcatcagcagagaatcgcacatcgtccgcagaccagcgaatatccgttgaggtgcgcccgtagaagatacgatcgtaacccagtacataggttgtgtttcggctttggtacgcaacagagcgcgatacagggtttcctacgcggtcgttaaacgccttgtagtaatgccatgtttgtcctttgtcgtttgacaccttcgccatgttctgaaaacgttcaaacaggtacaataaaccgtttgacgctaccaggaaagttctgttaatgtcattacaaacgtgttcaatatgatcctggatttcgtgatagttttcttgtgtaagaattttatcgctgatctgggatacgtcagtgtaaagtggagaaaacacaaagtcttctttcatcaacgctgccattaccacatctgtattaaagttaacgtagttctgattattttttgcgaatttctcgtttatgaatgcatcgcttggcgtaaattcacgcatggttgaatatgcgtaagcgttaagggtaaacgtccagagttcatctgtataaacccagtcagacggttcaaagcccttgtgcgtaaccatgacgcggaacttgtaaaaattgttgggctgaacatcggaagaaaaccattcgtttacataagcataacccaactggaaccaggttaaatcttcatctggaatagttacaccacctaccccgcgagtttctgccatttccacgacatagtaaaaatccatgccgacgctatcccacttcaaataaacgaagttagcagccagtttatcaacgcgcaaactggtaattgacggcgctttaatcatatgtttctccaaatttgcgttttacttatatcccatatttagcaaacaaaaaacccctgccaaatgacaggggttgtaaattattgactgattggattcatcgtcaacgttgtatattgaggacgtagatcgttttcaaatacaatcagagaaccatcacgggtgaaaatgttctcttccagaggtgtaccagtcagttcgatgtaagcagcgctgaatcgctcggatggaacgttcaggacaccaagatcgaaactaatgaaatcattaaaatgttccacatagccgacttcgtaatatttatcacgatcggttactccaggatatttatcaaaatcgttttctgtataggctgcgataccgatatcaccgtttttgaatggcccgataaccattttcgcgagtccggtcgtggtgttcatatctgttgacgcatagcgcacatcatacgaatcaccagcagcatttgtgtacttgaacccattcgaaacaacagaacgtgatttcacctggtttaagaagtgaataccagacatcggggcgctgtaatagttatccagttcacgcaatagctgaatagtcgcagaagaaccaatgatcgacacgtccgcgttatcaacataagtcaacatcttggatttactgaaagatttgttgaaaatttcaacgttatctgtgtagtatctgtcaatttcattgattacttgaccacgcaaccattcctcagactcgatcaacttactgatatcatacgttactttaacgctttgtacaatatacaggtagttcgggtcaaggatcgacggcgtaatagtcgccaggttatacttcgccagatagttttgcatgtcctctttttgaacagaggttaagcgcaaccctgatttcggtttaacagcgatgaacgcatagccaggtttttctttatcagtaaagcactgaaccgcctgaataacagaaccgaaacggtgagacaggaacgattcataatccgatgcagtaacacaacggcgctgtgtctcacgcataataggcgcgagttcacgaatacgttcgatatcttccggttcaccaccaccatcagcgcctacatagtccgctgaatcagtcgggttttcaacaatacttgtaatgctgatatttgtcaatgtatccacataaacaaagttttccgcaccattggcttcttcgccattggttgaaatatattcaattacaatagtcgaaccgtttgcaggtttcaagcccccgatgtaatccgcagtcagagcaccacctgcgacctgttggctggtttcaccttcaccaaagtaaacttcggtatgtccatccacagtttcacgcatgtaaaaaattgttgatgcgcctgttgcgtttacgatactttcgtttgtccagtcatcccattgagcaccgttgacagtaacgcgaacctggctacggtcgatgttcggatctcgaaccagaatcgtagaaccatcatagatgacttctgtacggactaaacgcccctgtacgatgttcagcatcgaaacatagttattgtctttgtcacgaacgatcaccacgtcatcagatacgacgaacgggaaactgtttgtttctttcactgtaccgatgaatttcgtgccgcgcggaatacggatcgatgttgggttcagtgggtttttcgcagtgatcaggatcgaagtatttgcagcggtgcgggagtccggcatatagcccaaatcctgagcctgttgaacaacagaactacgcaatgcagcggtacgaataaacgattcgaacagtgcggtgttactcatttgctgaatgtacagtgtacagtatgataacagatccacaagtacgttcatgcgcgagccggagaaatcataatccttgaattcgtcctgacctcggagccagttgattaagtcagatttgatttcgtcaaaagtagccccgacaaagatatcggggatctgattaatttgtttctttgtagtagccattattacccctcgttatcgggtatttagtattgaaccatagggacgcaaacactaattgaaccgaatgtgatcgcgagtccgattaatgacaataatttgtttacgtattgagttaccttacttagagcaagcgtacaaatctggttataaatcaccttgcatgtgtccttaaacgagcgggaactgtcaacaaagtttttatatagcgattgtgcgcccgtcagcgcgttctcatacgtttttaacaggtcatcgaatgcaaccccacagtaacctaagaactggttaatctgagccattacaggcagttttttgagttcagccattgccatgctgtaggtgtctttcatcccattttgcagattagcaatctgtgctttgattccctcatatgcggccttagtcgcattcacagcagcgttagcggcatcaagtgcagcctgataagcagcagtcgttgcttcctttacaggttcccacatccagtttaggtactgatcgaacttacgtttaatcgaatccctttcctgtgtctgtgctttcagggttttgaataattcttgtccctgatcatacagtgcggagatctgcgcataggatgcatcaatgaacgctttcactttcgcttgtgcttgctgatacagatccattgctgtaaaccctgggaagttaccgcccagaatcacatcaagaggtttaatctgtttcatgatgttacggatagccagcaccgcagaccaaagcgggtttggtgtttctggaggcattgaccagatctgcatcatgcgcccgtacaaatctaccaaagcaacgcaaccgttttggaacatagtcaaacaccagtcaaataacgcgctacaagcgtctacaaggtcgcgagcgccagccttgacatattcaacggcgtagttgtaagaactgcctatagccccgtatattgcgtttatgacgctttcatacgtctgtgcgccggaatcaatcagagcttggaaagaatctttcagggattgaaccgaactatcaccaaacaccagatcgtaaatgttgatcgcaacacccatgatcgcaacagtcgggaggaaattcttgatcaaatcccacgccccgcccacgatgttaaacgcagagctaatgatctgtcggaataccttcattgcggtttgccatgcttgctgtgacaatgccagagcacccgctgtgatttcttccatcccgatcgaaagcccgtcaaacatcgtcgcaatgcccttaccgttcttaatcgtacccgtcagcatatcaaaagccagcttgaacgttttacgagtctcgttccacgcagacagcatagcatcactgatattcgtatacgggaaccctacggtcgccggaatacagcccaatccagagcgagcagaaaacaatctggcttcactcggtagcgccccatacgttgacgggagagcaggaggaaccggaggaatgctggtatctgcgttcgtgtttactgacatccctgtatatttgcactggtgcgcgggggattcgtcgtgtttcatgtacgcaatacgattaccattccagtaataatcaatgctggtaaacgcgcctgtagtctgattgtatacctgtcggattcgctgatcgcaacggggaccagaagtcagcaagtaaccaccggagttttccaccttgtacatcgcgagttcgccagggttcttgaacaagtttgcttttgacagatcagccccgtaccagtcattacccgcgagcttagtagccccgatagatgcgatataggcatcaatatccgcttgactggcgaaatagtaaccaatcttcgtaaccagaatgtcagtagaaacccctggggttccgtctggattcgttggtacgtttggagagttcaccaccggaagcggatcgcttttctgcccgaaaggggaactcgtatacaggtgagttccgatcgggatgatttcggtcgcccattctaccccaacagcagggtaattttctgtgtgtccctgccagataacgcgtctgtaatatccagcggggatctcagcatcgcaaggatgctgaaagttttgcataatcccatcaatgatggtttcataatccatgatcatgtttagcctacctgtacagtaccgccagtgatcttagtcagtgcgccggaatcaatgaaagtattattcgatgctcgcatgttgatattacgtgcgccaatatccaaatcttgctcaatatcaatcagagcattttttgcggtaattgttgcatcttctgttacggcaacggttgcattctgtttaacgttagccattaaattctgattcacgtttacggttacatctttttcaacggttaattctgcgttgcctttaatcagccccaaatattcaccttcaacggtttgattcacgttaccgcgcacgaactcggtcacgttaccatcaacggtctgttgaacgttacccatattgtaaatgaacgcatcaccttcgataacaacctgcaaattacccttgacgtttaatttacggccttgcatgacgatttgataatcatcaccaacgattttaacgacacgggttccatcaggacgaatttcttcgtatgatcctgctgggtgaacacggttgtaacgttcaaagcctggggtgtcgtcgaattcctgaatgtgtccagaacgggattcgaataccatgttgtatggatattcagcgttgtatgccgatttaggttcttcaaacattacgcgggtatcaccaggaacaaaaggatcttctggatttgatgcagccaacacaacagcattgtatgcagcactcaatgaacgcccttctggatctggaacctgaacaccgtatgattcgaggttgcccgtcagcacgattttagatacgcgtgaagaacgtcctggtgtctggttagcccatgttgagtttcgcagttcgttgtaagcggtttgccagtcctgacgcttcatagcagccagagcattagtaaatttggcaacaccaccaacacccatctggaagcacatgttttcgattgccatttgacgaggacggtttaacgtcacgtatacttctcgaacgtttgaagtgttgctgatcccctgccggacttttgccaaatcctgagcaaacagcgttgaaacttcttctgctgtgatcgttccattggttacttctcgaccaactgctttactgatcgcggcattgatcttcgcagtatcacgggttttctccatgataagcaaatgcccgatcccgatagtcggataaccttcactatcaatataccattttgtgcggataccttcatcctgtttaagcatgttttcgatagtgaacccgccagtatcaggacggttatcttctgggatctcgtcaagtgggcgatcatctggattgacagctaacgaactgttagcatcacgaataatcacgctcgaagaaccgcgcccctctgcgccaccacgagccagtacgttgacatcgttacctacataacgaggatactcaccaaacgggtcacagaagcctttctgggtgtccggtttctctcggtactcacccgcaaaggttcccagtataacgccgtcctggtgccatttatcgcgccagtaaccgataacaaaactaccgcgcgtgataccagtcggggaaaaaccaacaccagaaatagcggcgctgcgaatatcctgaataggcatcatccacggcaattcctcaaccggaataccgatagtttcagatttttgtttctgtgccggatgctcaccgaatacacgcacctgaacacgccccaatagacgaggatcatcgacttcttcgaccaccccctcaaagaaaggggagtatttatttccaccgtatttcataggtttgccttttccatttccttgatataatcacttacaaacgattgaatatcagaggggttaataatcttgatggttcgttttgcttcattttgaagcaccgcatcttcataaatatctacagggactaatgttccctggtactgcaaataacgcatgttcttatcgcctttgtcataccaatgaccggaattcgtagggtcttcaaccaaattgtaataacggttgcccttaccatccatatgataaagaacctgttcaccacctgcttttgaataacgctggatagcgcattgataagccgtttcctgatcggtaatccatccgtaaaacggatcgtaattatcgttaagcatcaggataacccagtagtattgctggtttccgtatagcgtttccgctaattgttcgggtcttaatgaacctgtcagttgatatgtacgcggcttataattcctgatcacgcggttaaagtaaaaacgataatcgcggtagatatcagtagttggtgtgcctttgtaatcaactggtggaaagaatgagaacaacattgtaatttcccctatctaatgtttactatatttaggatctaaaatggctggaagacagacatacaaggggtcttttatgccccagaacatacagaaatataagggagatccgcgaaagataacgtatcgttcaagctgggaaaaatatattatgaactggcttgatagaaacccgcatgtgaaacgctggaacagtgaagaggttgtgatcccttatttcagcaacgcagacggaaagcgacggcgctacttcatggatttctatgttgaaatggataacggtgtgacctacctttgggaagtcaaaccgatgaaagaaacgttgcccccacctaagccagcgaacaacaacgttcacaacaaaaagaaatttgttgatgcgttgtatacttatgctgtaaacattgacaaatggaaagccgcgaatgcagcagcaaaacaaaagggctgggagttcaagatcatcacagaggacacgttgaaacgtgtgttcggatggaaagggcaataaataccctaaacggagggaattatgagctttatttttgagttcgagatcatcgcagaagaagacaagccaaaaccgccaccgaagcgaaagctgggtgaatgggttgaacttggtatcaaattccgacgcgcaaaattaaaaggcatgacagccaaaaagttcgcggacgaaaacgggattgcatacgcaacgttcacaaagtctatgcaccgctacaagcagcagattgatgatgaaatcgaacgccgtacagcagaaaccgaagcccgacgcaaacgtaacgactatcgcaaaaaacacgcggttgatatcgtaaacgatttccgaaacagtttgaagaaaatgactgttggtgtaaccgctgcgaaacgtcagaaggattcgaccgattggtttggtgatttcatcaaaaccagcattaagacgcacagggttgcgaaaccagcaacgggtcgcttgtatacgttcatctacgatgcgaaatacaaagacaccctgccatactgggatcggttcccgctgatcattttcctgggttcaggacgttcgaaagcgggtaacttggttctttacgggctgaacttgcactatgcgccaccgcgagcacgtcaagagtttttagaagaactcctgaaacgtggctacggatcaacagatcgactttctaacaaaaccagactgaaaatcaactggaacaacgtgaagggaatgcgcggggctgatcaaatgatcaaagcctatctgccagcccatctacgttcaccacttgcagagatcgccccaaaagattgggcgaaagcagtttggttgcctacacaggctttccagtccaaaggaaaaccatacagcgcgaagaaagtttggaacagatattaacaaaaaagccccaaccgaaaggaaggggctttatttttacaggatactcacgatttccgcgagtttgccaggggttgcgccaggtcgaaccttcatcgcatctttcaggtttttatcaaccatcttttctgcgtctttttcgttaaacccacgtttcaccaacacagcaataactttttcgcgaatacctttagcggcttcgttcaaatcttctgattcagctagaaccagtttagacagaacatcacctttgtattcctgggtaaagcgtttacccgataccagacgaggcttaccagaggcatctacaaccgtaaacacggcgtattcgcctgtagctttggttttggtacgtccggtatacaacaaacacatatcgttgcatgggagcttgtacacctttcctttcaccagtgcttcatccagaggcagatcaatttcgaaatcttccgccaactgattatacagatccagattttcttcggcttctttgtacagggaagcgcctttgaatttcagcggcttgtcaaatttcaggtcatcagcaggatcaccgctgtagaatgaaacagtgcctttcgcccagtcaatatacgctgcctgggtttttccagtggttttacctttcaggcggacaacacctttaccgaagtaagcgagatcgtgggaatccggcgcataaacatcgtaatcagcaccgtgtgcgaaatgcaggaaaccgatctgaccttttgatggagcaacaccgttgcgatcaacaagttcaacggttttagcaaattttttgttctgaacagattcagaaagtagttctttgaatgatttcatgttttcaatctcttttgaaagtataggtatgatatacctatttattgaatagatcaactaaaaaaattagatcgcgagcgaagcgagttccgtcaagcgaagcgaagacggatagttaacgattgtataaaaagtatacggaaatgtactgttttctctatatataaaatataaatattataaacagtacatcgtacataacactcacttcgttcgtgtgttcgcttcgctcacggtctaacctaaatatctataaaatggagatcatcatgaatacaactgctatgatcctgaaccagatttcacctactaacttcatgttagatattcctgacaatgattatgtaaaagggttgaaactacaagttcagggtgttacactaccttctatcaacattccaattacggatgtcccactgaacccaatgattcgagggaagatccctggatctgcaatggagttcgatccactgactattcgttttgctgttgatgaagaactgcgatcgtatcttggggtttacctttggatgctcggtactgtagatttcaataccttcgagtctgttcgctggagtgaaccacaacaggcaatggccttgcatatcctggataactcgcagtcaaaaactgtagcgacatttcgcttctatggcgcttggccctccaacctcggagagcttgagcttatgtatactaatgattcggatgaagccgtatcctgtatgacgatgttcaactttgcacacatggaaattgaaatcgacggaaaggtgatcgtgccgactccacggaaaacgcaaaaatgatttatggtatttgtggtaaaaagcgaacgggtaaagataccgttgctcaaatggttgtgcataacttccgcaatgttgaagttatcgcgttagccgacgaaatcaaagctatcctgaaacgttctatggaacatcatgataatacgcaattgcgagcgctggcagcgaagaacccattctatgagggtgatcgtgaagccccgctggtgatgtccaataacgatgcatacgcgctgttttctagcggtatcaaaaaattaagttctcgcgggttcttcatgagtaacgcagatgttatcgctcataaaatttgcgaagaaaacagccagccctggacgattcgtcgtttgatgcaggtgttcgggactgatattgtttgtaaaatagatccgtctatctggacttcgattgctattcaaaaaatgttgaaatcctatgcggatcactttatcattaccgatgtgcgtcaaccgcacgaatataaatacctgagcaagttcgggactcgctttgtgttccttgaacgtgaaactggtattgaagataatcattcaacggagcaaggtttgacacctggcttgagtgattatacaatcctaaataatggtacgttagacgatttgaaacgtaacgtgcttaatgtattcaatcttttaagagtgtaaacaatgactgaacaaaaccaaacccaacagcttcaaaacgatgtcctgatcctgaaagcccgtgtattcgacctgaacgaaatcattcagggtaaagaacaagaactggcaaatcaccgtcaactcgtaggccaaatttgcagtcttctggaaatcgacggttcgcagggtgtatcccctgatgccctggtcggcgcgatcaaagcacttctgccagcaacagcagaaaccgctggcgacgatgaagcgattgatgcatcaaaagcataattaacgcttaggcgtttaaccactggggggcgaaagcccccttttcatttggagtacacatgaaaagttttattgaagtagcgaaacccgtagttgatccggggatctatatgtgtgcgaagttcgatcaggcttcctgtgaagcgctcgcgaaggtgcaaaaacttctgggtgtagagaatcctgtttccgctgcaaagctgcatacaacgattgtgtatagccgtaagacggttgatctgttccctgcatccggtatctctgaacctgcccgactggttgacgtgtagaagtgggaaacgaaatacggtaatacgatcgtgggtgttctggagtctgattatctccatagccgcttcaaagatgcaatggatgctggagcaacatacgattatgacgattacaaaccacatgtaaccctcgcgtatgattcccgcatcgaagatatcagcggagttaaaagactgttgacattgcccgtagatttgactatcatccaggaagatgctgaacctctggatctggataagaaagtcgaagacatcacggagcacatcgaacatcgcggcgataagtgggttatactgaaccatgatcgcacgaaagaacttggtgaatatgattcgaaagaggcagcggaaaaacgtctgcgtcaaatcgaatactttaaacataatgggtgatttatgaacagagcacgattgatgtatgttatcaataacttacgcagagaagttaaccaaaatttcagtaaagcgttaagtgattggtatgtgacaaaggtttcaatgactacagatcacatcgcagaccgattcctggatcgttccgcgtcagtcaaaaaagactttgcggtctacagtgaaattcttaatagtctcgctaaacattattcgtgtaacgttctgcattacgcggtgaaagcgaaaaacgaaggtatgcaggaagttattgcgtatcgccggattaatggcaaagtgtttgcctgtgcgttcaccgtccagatgttcgaaaacatggatgattctgttgctcacgaaaagccagtgattgctgtacgattccgaaccgttatccctgagtacacgttgagcctgaacacgcgaaacgcgatccatgtaaactacatcgcacccaaaatcaagttcgagtatgacggctacagacgcgttatgtcacgcctggatcgcctgattgcttcaaaagattgtccacctcaactgtatatgttgaaaaatatttgaaaaaagcccttgcattcgtgcaggggcttttgttatattaggggtgtcgaaacaaaggaggcaatcatgaaactttactggctggtgttctcaaacgggtttgtaatgaaaggcactgttcactgtgcgaaaacttattgcaaatggaatgaatgctctttccgtatcctgagcgttgcatcttctcaacctgtaggggattactaatgactggtgataagtgggttgataaaactttgttgttgacagtaatctactttctggtaaaatacctggtgtagacaaaggagggagttatgagaaacttactgaatatcgcggaaatcttttgctatggtgtcgctgtgtatgtcctgtttaacggtgacggcgcgggatactggatcatgttcggtggtggcttgttcctctctttcatcaaaaaattttttaagtgagaaatatactatgcgctcaaatgtaccgaaaaacctgtataccgttattgatgctggttcgattcgtattgctgatgtaatggcactagtcgaacgcttcgatcgttcaacgacgctggggcaactgctgagtatggttaaatcccagtacccgcacaaatgcccgaaatgcgagggtaaagggttcgaagttgtgcgtgtcaacacgtatccttctggcttgccggattctggctgggttgatcagatggaagatttcaacgttacctgtgatatctgtaacgggcaaggcttcaccaaagaacgccttatcgcaaaacctgtcaaagtggaatatgtaagagcatgaaaattaccgatctcgtaaaagcggctaatgcgcttgtaacaagcgatcattacgtcgattactgcgagcaataccctgttcccctggaacgcgcaattgctcaatccggttatgatggtgtcagtaccgtaaccgttgaaaacctgaaaacgttcatcgtgtttgctaacacgttctggatgtacttacctgataatatcgggattcgccagcctactttcttcacgctgtgcatgttctgcgaaacttatctccctgaatgcgatgactacgaagaacattatggaaaaagtgaataaagtatccctgatgcagtttgataaaaagctggggtttgcattctctcacggattcgccccagacgcggaaaccatgtttaaaatggcttttggcatcgatccggctaccctcgatcaagaggtgttgtcagacatcaacaaaactggtacgctgtattatgcccgtctgccaaatccagaaaacggcattcagtaccaatcgactctcgaaaaactcaaaactgaactgaaagaaataggtgaattatgacttctacagctattcaacaacaaaccattgatcattatgctgaattcgcacaactgatcaaagagcataacgcttttgcggcttctcgtgtcaacgaagaaagcgaacatacccgccgatctctctgggttagcatttaccgcgaagtgtttagcgagaactccgctaacaaacacacacaggctgttgatgcagcagataaagcgctggcagcatacgatcgtaagttcagggtgcagtaatggaacggtctgctggtattctcttcctgaataacggcagcgttttaatgggccacgcaaccgaaacgcctcattgggacatcccaaaggggcatatcgaaaaaggcgaagaacctattcacgctgcgatccgtgagtgcttcgaagaaaccggagttcttgttgaaccgcacgaactggaaagcctcggaagactggattataccagtaaaaaagagctttacttattcgtgtataaaggcaataattaccccgaagccgataaatgcttctgtgcgtcaacgttcgtgaagaacgggcgaaccatcacagaaatggacggtttcaaatatgttccgtatagccagatccgcgatcatgcgcgtaagactatgggacaccttctatctaaacttgtgggatatacatcatgaaagcaacaacttttcaaatctgtcaaatgatccttctggctaccgcaacccgcgccgctgaacctatcgcgtatcagtcatggggtgattcattcaccgtgaaaaatattcgcgatctgcctggacgcctttacgcttcccctgatttcgaacccgtcgatccgaatgatttgacgctggaagaaatgaaaaatctgggcttccgtaagtggagcgacgattcaaacatgatgctgatccctctgtatctgttgccatacctgaaagacggtttccgcgctatcagtatcagcggtgaagaatttgaattcagcactggtgaatcagataacgatcatcgtatggggctgctgtctttcggggcattgcctaaatgagtcacgttgatttcaacaccttatctcaattggggctgatttggaaaatcaataaagatatcctgcatcccctggggctggcgttgacgcgtgatcctgaaactggcgtatcaatcggtgcgctggtttccgatgatggggtctggtcgttcagcgaaaaatcagactttgaaaatatcgcaaagctgaataaactttatgctttacaggccgaaggaaagctgttagagttcctacaacaaaacgtgaaagagtgatatattatgacttacaaagctggcgatcgtgtagtaaccgttaaggatggtaagtttgccaaagccggaacgcacggaattgtcaataccgaccgtgatggtattctgggtgtggttgtgccggatcatggaaaatcaacattattcgaaacagacaaagtgcgtatcgcaaccgctgctgatcctggttactatggaacccgcgacgagttcgaaagtgaaaaggatcaggagatcgcagaactgaaaaccaaagttcataacgcgcgggtgttggcggtgatttgccttaccgttgcggctatcaatactggtttgttgggttgggtggtgaatcatgtctaaagatgatattccggttcataaccgtatccgcgatcagttaacttttcgcagtcgcgatcacgcgattatggttgggagttatctgcattggtggaagaataaagatctggatctgaatccatcttatcagcgcccctatgtgtggacgcagaaagagcaagatgcgtttctgactaccctgatcagtggtttcccttgcggtatcatcgcgatcgcggttgatagccagttcaacgaaactcactgggtagaagtgatcgacggcaaacaacgcctgacgacgattatcaaagtctacgaaggtgaaattaggattcctatgccggacggttcccgtttgttctgggacgaaatgccacgacacgaacagcgagcctttgaaaacatttcattacctgccctggggctggatgaatgcaccaaaaaggatcgtctggaattcttcatcaaactgaacttcgcgggtgtgcctcaatcacaagagcatatgaaccgcgtccttgaaatgtataaggctgcaaaatgaacaaagacgaagaactgaatgttgattcagtagaaccaaaccagtttatcatcggtaaagaagatcatgaactgttacaagcggttaaaaacttgctgacctatgctcatatccgcgtaccgaatggcgataacgcaaaactggaaatcgcatgtgctggttacggttacaccgctaccgctgataaaatcattagctattcagcatccagaacccgtgaactggttcattaccgcgataaattgagtgaagaaatccatcaaactcaggtaattgtagatcaattgccagaaaaattcgattaaagtgaaaaaagcccttgcagcaatgcaggggctttgttatattacacacatcgaaacgaaacagagaaaggaaaacatcatgaacatgaacaaaaacattgccgctgtagttggttgtgaagtttctaacgcagaacgttatgacaacggtttctctttctgtgttccgactgaactcgatgcgtacaaagccgcttacaaataccgcactatgccgatggtaaacgttacttacgcgccgaacatcgaaatgtggctggttcaggtttacaacaaagtatgaacttccacgaacgcaaggccgcacgaaccgattattacatgcggttcgtgtatggctggaaattacggaaatgtgttgcatgtaacgggtcggggcgatatgatagcgaccgatctccgaaatgcagttcatgtaatggaaccggaaaagaacgctttaaacctgtgaggaatatattatgcaacatgtgaatctcaacccaaaaatggaaaagtatctgaatcgccgtcatgacaaccaggcgcaaagggatcaggaacgcgcaatcaacattgaaacggctaaactccttacccagatgttccgtaagtttcctagcaaattcccatgcaattctatgcattcaagtaactgtatcagcgtagaactggctgataagcgttgtatcagggttaacctggcttacgggttatccgaagacggatataacctggtgatgggctggacatcaatgatcggtaacttcgttgaacagaacaatattgagttcaatatgatgcgctctgatttgttccagtgtccggtcgattcaatcaatatcggtagcctttacgctatccttcgcgcacaatatgatttgtggagtacaaaatgaaagtaacaagtgaaaaacttgaagaaattgaaaaatcagcccgttcgatttcttctatgatgggtagtaagtggactctcgttgaaaatatgagcatccagggaaatcaggaatatggtttcaggggcaaagagtataaacgcgcgttctcatatggtgttccatatggcgacagccctacacagattaaaagctgggaagagggtctcggaaaatatctggaaaccgtagatccgcaaacggttctggatctggttagcgatctgtcactcgcgcttcgagacaagcaaaaagcagaatcagaagccgcgcactggaaagcaaatcacgaatgcgaagtatcccgcgcccgtgtcctcaaagagcgccctgatatgccgctggagcgcgtcaacgcatacaaccgtatggttgagttggagaaagagaacgaagccttaaaacagcgtatagcgagcctggaggatgtcaatcaaacccgcatgatgttgcagatgattcagagtatggtgattgatacccaaaacatgaaccgcgaacaactgcgctactggcaaacccatttccgcaatcctaacgggtggtgatatgttcggacgaaaacgtaaatgcaagcatgttgctaccggatggatgcggggaactccttacgcttggatgcatcattctgtaaccgatgggatcgggcgtatacatggcgatatgtatgcaacatgcgacaagtgcggggagaagtttttgatgtgtaagatacacgttgatcacgcgatccgtgagctggcaaaacatccaatcacccgcgccgaaatccttcgaatcctcgaagaaacaaaatagcactttttgtttaaaaagccccttgcaaccgccaggggcttttgttatattacacacatcgaaacgaaacagacaaaaaggaaatcatcatgaaacttgttcgcgaagcaatcaaactgggtaacgaatacaacggcaaatggtacttcatcatttatgacgacaacgcagaaaaactggaaaaagttgaagatgcgttacgtgcgatggaaactggtgcttctgttggtggtaaagtgatgacctgggaaaactactgcgacggttgcccttgctacaacgatggtttcggttctggtttctgggttgatgttgaagatgttccagcgttcaaagccgcatggaaaatcgctaagaaaatggcataattagcacgaattgctaaaactcgataaccctgaactgttattgtacacacatcgaaacgaaggaggaaatcatggaaatcatctacaaaagcaagaactacaaaaaagaagatgttgctgcggtttacatcaagtaccgtaacgtgaaatgtgagtacagcgggatctggggttacgaaatcgttgttgaagaagtcaacgccgacaacaaaaccatttgtagtttcaccactaataccgatagccctctgttcactactgaacagcttgaacaggcttatgaactgcgcaaccaggcttttaacgcggtacgtatcaaatgagattccgtccttatattgaattccttcgcggtatcagtgagatcctgaaccgcgaaatcaaacccagtccgttagccgttgagctttaccgactggatgcaacccccgaagatgcagcgaaagattacggagaccagttataatgttaacttttgaagagtataaagcacagcgtgatcagttaagcaactggcacagagagatcggcagggagttgagcgcgtaccctaaaaacgaaatgggtatgacgatcgaatcaatccgtaatacgccggaatacaaagcgaaacgtgctttgtgtaataaagttttccaacagcttcgcatccttaacgggaagtacatcaaaacgtacaaaaaagaactggctgacgaacgtaaactgaaacggagtgtaaaatgatgcaacacgaaatcaaaacagagattgacaaacgcaccttcctggaaaagaataaaacggtaacgctgatgcattactccaccaaaaacggttcgagtgagttctggcgcgttaacattgacagcaaaggccagggaacatcaatcccgttcgatagcgaaaaactagctcgcgctgtcttccaatcccatgttaaattttgagaattatattatgaaaactgtcgatatcgttaccagcatcaaagcgccgtccctgttcatctatcaacacggcaatatgcgcttcgctcgctcgaagttctacaactataatttcaacgttgatactggtgaattcgctcgctggggtgcaacatattcccacgatccagaatacgcaccattccccgaaattctcgatatcgagatcactaccaaatgcaacggaccagcgggtaaactctgcgggttctgctacaagtccaataacccgaacgggttcaacatggatcttgccaacttcaaaaaaatcatcgacaaaatgccctggcttactcaatgcgcactcggtgctgatgcacaggggcaaacaaaccccgatatgttcgatatgatggcgtatgcgcgttctaaaggcattgtgccgaaccttaccattgctgacgtatcaaaagacgttgcagcgcgtttagcggcggttgctggggctgttgcggtatcggtttataaacacgctggctttgatgtcgctttcgactcagtagcgaacctgacagaagccggacaacagcaaatcaaccttcacttcatggttagctcgaaaacctatgatgatgcgtttaacgtggttgatgccgtgaagaatgatccgcgcctgaaacaagtcaacgcgatcgtgttcctgggactgaaacaaaaaggacgcggtaagaactgggacaccgttacccgcgaacaatataaaaaacttgttgaatattgcctcgattctggtgtaggatttggattcgatagctgttcagcccccgctttcgttgaagcgatggagggacacccgaacttcgaacagtacaagcaatacgccgaagactgtgaagcgacgatgtttagctcttacatcaacgaacgtggtcagttcttcccttgctcgtttaccgaacgctgggttgaaggtggctgggaagaaggtctggatgttctggaagccgaagattttgtgaaggatatctgggaacacccgaaaacaaaacagttccgtaaagaactgacgggcaacaaggatcataacggttgccgtaactgtccggcttatgcggtatgtggtaaagatatgcgcgtacacaaagcccctgaaaccgatgtatatgcagtggagttgaaataatgttaatcgtatctcgtattaaatcatacgttcgtgatcgtgatattctggacgtgtcgcctttggttggtgaaactgttaccgtaagaaactatccggtgaatctggatcacgtaacctggatcgaagatgatgcaacaatcgttgttgaagggaagagacacccagcaatcacttttcacctgatctgttcaaccccgattacctgggctggatatgaaaacaaagaacagcgtgataacgctatccatgcgattgagcgtagaatgcagtttgcggagatcacattctgatgatttatcaatcccataatgattcaacgatgcgaatggttccggtaacggttgacattccagtaaaaccgcgtacactggaatcgttgattgaaaaatactctggaatggttatttgtccttctaccgcacaggtggcaatggcagaacgcgatgaaattgtatttgaatgtgatacgaaaggatatcataccgttgaagatatgcagatgattgaatatctctgggaaatccgaaacgctgtagtacatcacatactgaccgctgaaaagaaagccgaagccgtgagagaagttgaacagcgcgaagagatccgctataatcggatgtctgcacaggaaaaggatgaagcatatgaagtgtaccgccgtagttgatgaattaatgagcgcgtttaaaacgcgccgtacagatgggcgtattaaagatccgaagtcaatcgcgatcatcgaacggtacgcgatgaagttaagcgaacaggaattcacgccaaaggctctcaatagcctgatggttctgaaactgctgatcgcttcgggtgatgatatgccgcacgatgaaaacagtgctgaatcattccaaaaggcttatcgttcatggggagtgatttactcccgctcgctgggttcgtatgactccgttatgtggaacctgatgcacctggatcgcctgatctgggaagtgctcgaagaagagggtattgtatgaaaattcgggtagttgaagttcatacgcctggatgggttcctgaaagaacatacaagttagagaaacgagtatttggatttttatgggttccattgacttttaaatctggtattcatactatccaatacgatggaagaaccccagaagaagcgctggaattattcagactaagaacggaaaaacatttaaccgttgttaaggaaattgattatgaaactcgatcgtgaattaagcatggctatccgcactattgaaatgatgcttgataaactgagcgcaaaagaagagttttgtgtaagtgatatcgaagcggatttagttgaatggcgcggtgcgctttacgaagcgacaaagggcaatgatcccctgttcgatgaatatgacgtgtataacgtcaaggtctggaacactgaataccgtttcaagtggcctggtgacgcttacgggcatattcaaaccatttacgtaactggtggtatggtgtttgcaaccagtgttggggctagtgaacttccgatcaatcccaatagtaaagtaacgacaccgaacccattagggcatactaccgtttgtttgggtgtggcggaggatttctccccgaactattcaggctggatcgaagccagcaaaactaaccttaaaagagtataaattatgtggaaaattgttgcgtgtatttttatggttgtcgttgttgtgttcttacagtcaagctgtactgacgagaaagaagcacagcgtatcctggaagcacagggttatacgaacatccagttcacgggttacaagtggtttgcatgttctgaaaaagacacctactcaaccggattcgaagcaactggtgtgaacggcaagcagatcaaaggatctgtgtgctctggaatgtttttcaaaaatagcacaattcgtttcgaataactgttgacactaatccccattgtgataatatctctctcgtagacaacgaaacagataaacaaggggattaaaatgaacttactgaacgaaatgctggaaatggttgaagcgaacaaagaagcaatgaaagcgaaagaaggttgggtagttgttactgactgcttcaaaccgcaaagctggcttcctgtgttcctcaataaagatggtaacgaagaacacggcttctatgatgctgcaatcttcgaaaccgctgaacaggcttgcgatttctggtcttacctgagcggtgacaagcctttcaccaaatacggtgtttgtcagtgcaaagacatttaatcccagccccgaaaggggcttttttgtaggtgaaatatgaccaaagcagaaagaattatcaaccatcttcaaaccggattcccgtaccagggagatttacagcgcgatatcatcgaactgttatcccagcatgacgggatggaagcggagataaaggaattgacacaccctgacgtgaacgtattcgcttcactgatggatgatgtgatcgctatcgactcggacgaactgatctgcatcgagacaacgaacccagaagataagacgatcctgaaacaagcgtatgaacggatcgaagcattacacgatcgcctgttcacgttaactttcccaaataaaaacgatagaccttgttgacatcaaaccagattatgataatctgtatatgaaaactaattgtgaggaatatattatgaacgcttttgaaaaacgtgctgtcctgaaagatatcaaacctggcgcaatcctgtacgaagtaatcagtatcactggtgaaaaggcacagatgggtcgaaaacatatcatcactggcttcccgcgtgaacatcgtgggctggggctgtttgttaacggaatcactgtgtatgatgattgggaaaataaaggtcaattctctctggatgatcgtaacgtaactgggcgcaaccattataatttccatgcgttgttccgtagcgaagcagatgcgcaagcatatattgaacaaatcaataatgataaacttcctcctgatgacaaacaggaaagtgttgaaatgacgattcgctggaaacgcgatcgcgcggaagatgcaatttggggttacatgtaaaacgttgcgcctcttaaaccgtaaataccctgtgtagcccatagggtattttcataaagaggtatgtatgtttaaatttagtcagaaaagcctgaacaacctgcaaggcgtgaagccggaactggttaaggtggtaaaacgtgctctggaactctcacctgttgattttggtgtacgcgaaggtctgcgcaccgtagagcaacagcgcgaaaacgtccgcaagggtgtttcccagaccatgaactcaaaacacatcactggtgatgctgtggatctgtatcctagcgttctccctgctggctggcagactaacccgaaagtgtggttgcctgtcctgaatgcagtgaaacaagccgctgatgaacagggcgtaaaactgcgttacggtatcaactggaagaacgatccaaaccttccgattgaaacgaaatttatcgacgcaccacacgttgaacttgcataaggcgacaacatgatttcacaattctatgttgacgctgtaaagcagtcacgtaacctgcaccttgcgcgaatcgttgatgggcgttgggggcaagaatgcggcggtgtgtctatcttcgaaactgcgctggatatgggccggatgtcgggtaaaaccaaagcggctttcgatatcatcaagcagtcgaaagggacactgaatatctacgttgcgccgacaaagcaaatgggtatttgtgctgcggcagaacatggaatggataagggcgctgattcgtctttcattctgtcgaaacgtcaagatctgaataccattttccgtggacaaacgatcaagtatcaggcaatcaacctgattttcgatgaatgcgacatgacgatcgacgaacggtttgaactggcaaaaacactgaccttgtgtatgcgttcaagtcatcttcacccgttcccatatatccatattatccgtttgggtatgtaatgaaaagtcatggttattcatcaagaaccatacaggaagagattcaatcccttgaatctcttctgagttatgtagatgttgatacatctacgggaaaagtgtattggaaaattcagcgcggccctatgtctcctggaagtgaagccggaagcaagaacgagtattcccaaattcattttaaaggttctatgtatttgcgacaccgaatagtgttttacgttgagaatggttatcttcctcctatcgtagatcatgtgtatggtgttgaaaatggagatacagcaagaaatctacagaaagcgacgaaccaacaaaacgcgatgaaaaagaaatgtaattcaaacagcagtacggggttgaaaggtgtttcttatcacaaagcaaatgggaagtataaagcgcagataaacatagatggaaaaagaaaatttttggggtattataccactccagaagaagcaaaagccgtttatgaccggaaagcgaaagaggttttcggcacattttttaacgaaaccacataaggttaatgtatgtcaaaatacgtattagacaccaatgttttgattagtaacccatattcaatctattcttacatcgaacctgacagcgaaatcattatcaccgctgcaacgatggaagaactggatcacctgaaaagcaaagagcgaaccgctcatgaagcacgactggcgatccggcttttgtccaaagcaatcctgggacaaaattatgaagcaattacccaaacaggggtttcgttaaacttatcgaacccagcagtaccggaaagcgtaacactgaaaatcgtcgattatgacggcaccgaagaattccctctggataaacaggatgcgcggatcattgcaacttgtattcagcagggcgcaactctggtgactcgtgacattaacatgctgttgatcgcgatgtctaaaggttgttcggttcttcaatacactggcgatgactcgctgaaagatagtgatgtgttgtattcaggttatatcgacctgcctctgttctgggaaactgttgaagtcctggagtatgtcgggcctgttgccgttataacgtattcatcgcttcctgacgcggatttctaccctaaccaatacattctatcgtgtggtgagattgtagggcgtgtggtgaatgctggagagtttcagcttgaagtgttgcctattaagcacgaacaggcgttaaagcgtaagctgatgaaaacaatccagcctcgcgatgctctgcaagcgtcattcgttgatgctattctggacaaaaacaatgacgttgtgaccatcatgggcgcggcgggttcaggtaaaaccatgctggctgttgctggtgcaatgcacatggtaaacgcgggacacttcgcaaacctgatgtatgtcaaggcagatagccctctgtcgggcgaaatcgggttcttacctggtactcttggcgaaaaactgcgtcctgctgtagaaccatgtattacgagcctgaacattctgtttaaggatcaaccggaagttgacaaatatgtagaagggctgctggagaaaaacgttgtccagttccctagcctgtattacttccgtgggcgctcaatcgggcatcctgatccgggtaaaggttctgttctgattgttgatgaatgtcaaaacttgagcaatcacgaaataaaatccattatttcccgttgcggtgagaacacccttctgatactatgcgggaacattaaacagattgacaacccgcgcaacactgctgttaacaacggctttgtgtatgcggttgaaaaacttaaagagtacggtcattcaagtcatgtgatcctggataccgtatatcgtgggcgacttgcagcttttgttgaagacaatttttgatcaagggggcttcggcccctttttcgtgaggtatacatgatcaacgttattatcagtccaaagctaattaccgtttgcgctaattgcaaaagtgggttagagtatgaactgtctgatgtacagaagaaaaacgaagtgttctacaacggtttcttccgtgctgctgattacatcgtgaaaaaacatatcgtctgcccgaaatgcggtagcgaagtgaaactattcttgtgaggttattatggttcaagttgtaagcattaccccaaaacaaactgcctgtcgttgtggtgctgttctgtcatacactgcgcaggatgtcaaagaaaaggtatcaactgattacactggcggtcgtgatgtgtatcgtgtgattcggtgtccggtctgtgataaggatgtagtagtatgaaacgtgaagaacgttatgtcgtgatgaaacatgcggatattgattccgcgttaagtgatagcgataaactgcttctctctgcggtgctaagtaaagttgagcgctaccgaaaagagcaacacaaagaacccctggaagcggttgttgtcgagcatgattggcctgaatatgaacaggtctggaagatgatcgaaacccgtgttgatcgcgaagaaaataatcgtaagtttgaaacgatgctggacaataaagaacgtctgggctatttctttgtggttgagactcaccaggggaaattcctgatcaccagcaacgcgcacagcgcaaaccgtttgaaagaatacacagggtacgaatatcgcgccatgttcagccctgattgtgggttcaacaacagcgaaatctttacgactagctggagcgttcactttaaacatgtggttcgggtatcgtttgatgaaatcatagcgctgtacgatccgattgcgtcaatttcaaactataacattgctgaattcatcgagaaaaagctgaccgaagcaaaacagcgtaaaatcgttgcataaataataagacgagggtatcatagccctctcttgttacaaataggtattacaatgaagaaaattatctttgctgccagcattttcttatgctctttttctggcaacgcggcgactgatccgttaggagagtttatccaaacactcccttctgtgaagtcaactttaccgctacaacaagcaacagtaatgaagaaagcgccagccaatgcccccagctatgttaaggaattggatgatattacaccaaagcagaaaaaggttttggagtacgctttcaggatcggtaacgaatacgatctcaaaactgcaaagccagttgaatcggaaacatcgaaacgtttgggatatcatttagcggctattgcctggatcgagtctcgcgcatgtgagaacgtagggaaaggcaaaaagaatcatcatgcttatggttgttttcaagtaacagcccgtagcgcgtccgcacgaatggataaatcatattccaaacgcgtagtaatcaataagctcgaaacccttcggggtggttccaagtacgcacttcacgaactggaatactggcttgattaccacaaaggcgacttgaaaaaggcgctggcgagttacaacgcggggttcaagtattcaaagaaagaagcccgtgattatgctcgcatggttaaccataccgcgaagctgttagaagaaaaacgcattatctgataaaaagcccttgcattttcgcaggggctttttattatgtgtgtaccaactattgaggattaaattatgagcacatcacatcgagttatcaccagtcatccgattatcatcaagccgaacatgctgcacatcattcagggtgtgttagatgaactgaacaaagatccaaaggttaaagtggaaaccatcacggtcgatcgtcatcgtatggaatcgttcagtatctacttcgcatacggagaagaaaaacgcaaactgtttatctgcgaaagtcaagatacgtatcttgatgttggcaacagcacaattcatagcggcggtgtttacttcaacctgaacgtgtggggcagcaacaaagagatcatggatatcgtgaaagttggtattcgtaagcacgtcccgaatgacgttagcatttacgaatgtgttaatgatgcaattgaagatcgctttgtgcgcgtaggggcttaacatggaaactaaactgacaccggaacagcagttagcgatcgttgatgaacgtatcgacgagatcagggcggtaatgaaaccttaccaggaaaagctgaataaacttctgaacgctcgcaaagacatcaaagaagagatcgatcacaaaaccgcttcccgcgtccgtgctatgactccgaagaaacgcatggagttttacatcaattcaccgaacagcggacgagagattttccatgatgcgactaagttcttccaggatatgggtttggggattgatggatataacccagaaaccaatcagcatattcttcgtatcgcgatgaatgaggatcgcagtaacctcgaaacagtcctgaaatcgcttcaacgcgtgaagccatatgtgaagccgatcggtggcaaattgctgttcgatatcttcgaacatacatgttcacagttcaatatgtactggttagcctttgacgttgcagaagaacgctggatgtgcttcacggattggagtctgaaacgcaatcaaaagccagaatttgaaagcgatagtttgcgatcagtgcttgcttatgtctgcgaaacccattattatacccctatcgaaaacgattcatactaaggtaaaacgatgaaaaaacttgcgctgttactcactctgtttgctggctttgctcatgctgatgatcgactggctgaactctgcaataatcgtgacattaaagacgttgcggtatgtgaacaggtaatcgctgaacaactggacgcggcttatgtatggggcgaagaaaatgcgcacctcttcaagcgtcagaagctggttaaacagcgtgagtttttgcagtctgaaccgatgatgaacctctgcaccaaagcgccaaataaggaacgttgtgaaaaactccgtacttacctggttgaagaatataacgctggtataggattatactgatgttgggattagtgatcttttatgggtgtgtgattgctgctgcaatcattatctggtattacgttaaaaagccaaacgaaagctcgttccctgtatatgatgacgagttggaagcgtggcaaagatgggatgaccaatttaaatgaacacaggttatatcttaatgtgtgttattgttgtgatcgcggggctggctgtgctggcttaccgccactatacaggtgatgaaaatgattattaaagaaatcaaagggaacgctgtagagttgttcctgaaacgaaaagtacacttgattcatgggtgtaactgtta

(The sequence listing continues in the following parts.)
